United States Patent Application Publication US 2025/0325599 A1 - sequence listing, part 3

SEQ ID NO: 2 - DNA, 4189194 bp, Clostridium difficile (residues 1-2,094,597 of 4,189,194)
  source 1..4189194: mol_type = genomic DNA
atggatatagtttctttatgggacaaaaccctacaattaataaaaggtgacttaacttcagtaagttttaataccttttttaaaaacatcgtaccattaaaaatacatcttaatgatttaatcttactggctcctagtgattttaataaagatatcttagagaatagatatttacatttaattgaagatgctattagtcaactgtcattaaaaaaatataatattaaatttgtattgagcgaaaaagaggttgctgatttaaattctgatagcacagatttaaattatagagttctttaccccaatctaaatccaaaatacacatttgatacattcgttattggtaatagcaatagatttgcacatgctgcatgcgttgcagttgcagaatctccagctaaagcttataacccactttttttgtatggaggagttggattaggtaagactcacctaatgcatgctataggtcatcatattgttagtcaaaaaaaagactcaaaagtagtttacgtttcttcagaaaaatttactaatgaacttataaactctataaaagacgataaaaacgaagaatttaggaataaatatagaaacgtagatgtattactaatcgacgatattcaatttatagcaggaaaagaaagaactcaagaagagtttttccatacattcaatactcttcatgaagcaaacaaacaaataattatatctagtgatagaccgccaaaagacatacctacactagaagataggctaagatcgagatttgaaatgggacttataactgatattcaagcacctgactttgagacaagaattgctatacttagaaaaaaggctcaactagaacgtatagatgtgccaaatgaggttatgtcatatatagcaaaaaatattaagtcaaacataagggaactagaaggtgcattaactagagtggttgcttattcttctcttagcaatagggtaatatcttttgatcttgctacagaagctttaaaagatattataacaacttctaaaaatgaagaaataaatgttcttagaataaaagaaaaagtatcttctgtattcaatttaaagatggaagattttaattctaaaaaaagaacacgttcaatagcttatccaagacagatagctatgtatttaacgcgcgagcttactgatttatcccttcctaaaataggtgaagagtttgggggtagagaccatacaacagtaattcatgctcatgacaaagtatctaaggatatagaagaaagtgaagaaattaagactaaaatagacaaaattatatcagatttgaagggataatttatacacaattgtatgtttatatctcttgaataacctgttaatactttttttgaacaaaaattattaacaaattatcaagtctaaaataacaaagatattaacatcttatacacatgttaatatctttgtatttataatgttatacatacttattaacattatcaacaacacctactactattactactatgattttaacttatttttatatataaaaagccagaggaggttatccacattgaaaataatttgtaatcaaaaaatcctagcaaatagaattggaattgctcaaaaagctattaatggaaaaacaacaatagaattattaaaaggtatacttatatctacagaagaaggtcaattaaaacttactggatatgatgctgaaataggaatagaaacttatgtacaagcagaaatcatagaaaaaggtgatgttgttgtagatgcaaggctatttggagatataattagaaaattaccagattcctttgttgagatagaaactgattcagaaaataatatttacataaattgtgtaaattcaagatttaaaattaaaggttatgcagcaaaagaatttcctaaattaccagaattaaatgaagaagatttatatagcatacctcaagaaattctaaaaaatatgattaaacaaactgtatttgctatctcacaggaccaaacaaaacctgttttaatgggagaacttttagaaattgtagatagaaacttaaatttagtagcaattgatggatatagattagctgtaaaaagttgttcagttgatagtttaattgaaaatataaaagtcataattcctggaaagacacttatagatgtaaatagtttgctttctggagaggataatgttaaagttgggtttaacgaaaaaaatgctatttttataattaatgatacgaaaattattacaagattgcttgaaggagattttattgattataaaaaattattgccaagagaacataacagcagagttaaattaaacactaaggaacttttaaatagtatagagagagcgtctttattgtctcaatcagaaaaaaataatcttataaagttatctataagagataaagtaatggcaattacttctaacacagaaaaaggaaatgtgtatgaagaagttgaaatagatttagatggagattacctagatatagctttcaattctagatattttatcgaaggtttgaaaaatatagataatgaggaaatatttatagaatttactacaaatgtaaatccttgtataattaaaccaacagatgatgttaattatatttacttactgcttccagtaagaatatcatcaaatatatagcagacatgaaggagttgtcttttgtagaaaatttttctaatcttagacaactccttttataagcatatttatggtataatatacttttagtgtatcaataggaatttgtttaaaatagtgacaaggaggaactattatgactgaaataactatagaatcagaatatataaagttggatcaatttcttaaattagcagagattgcatcaacaggaggtcatgcaaaatttttaattcaagaaggtttagtgacagtaaatgatgaaatagaattaagaagaggaaaaaagataaaatcaggagatatagttaaaatagaaggaactaaaataaaagtattgtaaaaaaaggagaactttttgtgaaacttaaaagtttgcaacttgttaattttagaaattataaaaagttgcatctggaatttaatgggaaagtaaatctacttgttggtaaaaatggtcaaggaaagacaaatatagtagaatctatttatatgctttcttttggaaaatcatttaggactaacaaagataaagaaatggttagatttaatagtgaaaacttatacattggaggaagtttttcaaaatataataaatatagtctaatagagctaattattggaaaagataaaaaggggataagaataaataaagttcctttacaaaagatacaagaactacttggcaacttaaatgttgttatattttctcctgaagatttaaggttggttaaagagggtcctaaagaaagaagggcatttatagacaaagagattagtcagattatacctaaatattataaatatcttaccaattataataaaacactttctcaaaggagtagggtgcttaaaaatatacatgttgatgaagctttattagatgtatatgatgatacgttagcaaagtatggaagttatatttatattttgcgtagagactttataaaaaagatagctaatatatctgaaaatatgcatatgaatttgactaatggagttgaaagattatcaattcgatataaaaatcaaataaatataactgatgaagatactatagatacagtatataataaatttttagccaagttgtcatcgaatagacctaatgatatagaatctaagactaccagatatggtatacacaaagatgacttaaatatattcataaatgatttagatgcaagactttttggttcacaaggtcaacaaagaactgcttcaatatcattaaagttatcagagatagaattaataaaaaatgaagttgaagaatatccagtattaattttagatgatgtttttagtgagttagatgaagcaagacaaaaacttttagtaaataatttaagcaatgttcaaatgtttataacaagtgctgaagtttcacataaaaaaatatttgatgaaaaaaatgttacaatatttaatattgaaaatggcgatgttattagcatagagaatggaggaaattaaatgaaacaagaatacggtgcaagtcagatacaagtattagagggattagaagccgttagaaaaagaccaggtatgtatattggtagtacaagccctagaggtttacatcacttagtttatgaagttgtagataatagtatagatgaggctttacaaggatattgttcagacatatatgtatctattaatgaagatggcagtgttttagtaaaagataacggaagaggtatacctgttgaaatacatcctaaaactggtaaatcaactttagaaacagtattaactaatcttcatgcaggaggaaagtttggaggcggaggatataaagtatctggaggtcttcatggagttggtgtttctgtagttaatgcattgtcaaaatggatggtagcagaggtttatttaaacggaaagatatataagcagacatatgagaaaggattaccaacatctaagcttgaagtagttggagaatctcaagataaaggaacaatgattcaatttatgccagatgagacaatatttgatgaaatagagtttaaatatgaaacattggagtataggcttagagaactttctttcttgaataaaggaataaaaatagtatttgaagataaaagagaaggacaagaaaaaagaaaagaatttcactatacaggtggtttggtagaatatattaagtatttaaataaatctagaactggtatacatgatgacatagtttatatagataaaaaggttgatgattgttttgttgaactagctatgcaatatacagatggttatacagagaacatatattcttttgcaaacaatataaatacacacgaaggtggttctcatttaagtggatttaaagcagctcttactaaaactgtaaatgattatgctaagagaaataaatttttaaaggaaaatgatgttaacctacttggtgaagacataagagaaggtcttacagcagtagtatcagttaaattaccagaacctcaatttgaaggtcaaactaaaacaaagctaggtaatagctttatgagaggtatagttgatagtgtaacagttgatgaactggggtctttcctagaagaaaacccatcaacagcaagaatcatagttgataaagctttaagagcacaaagagctagagaagctgcaaaaaaagcaagagaattaacaaggagaaaaagtgtattagaaagtacatctttacctggaaaacttgcagattgtgcagaaaaagatccatctaaaagtgaaatattcttagtcgaaggggattcagcgggaggttcagctaaacaaggtagagatagaaatagtcaagctatacttccattaagagggaaaatacttaatgttgagaaatcaagactagataggatactatcttcagatgaaataaaaaatatgataacagcttatggttgtggtattggagaagattttgatatagataaggctaggtatcataaaattataattatgaccgatgctgatgtagatggagcccatataagaactttattattaacattcttctttagatatatgagacctcttatagatgaggggtatgtttatgcagcacagccacctttatataaagtgacaaagcaaaagaaggaacattatgtttactcagataaagagttaaatatcttattagatgaaattggaagaaatggtgttgaacttcaaaggtacaaaggtcttggagagatgaatgcagagcaattatgggaaacaactatgaatcctgagacaagaactttattacaagttactgtagaagatgctgcaattgcagatgaagtattttcaatgcttatgggtgataaggttgctccaagaaaagaatttatagaagaaaatgcaagatttgttagaaatttagatatatagagagaggggattagtatacatggaagaaaataacaaaatactccctattgaaatagcggaagaaatgaaaaaatcgtatattgattattcaatgagtgttatagctggacgtgctcttcctgatgttagagatggtttaaagccagttcatagaagaatattatattcaatgagtgagttaaatttaactccagataaaccatacaggaagtcagctcgtattgttggggacgttttaggtaagtaccatcctcatggagatactgctgtttattatgctatggtaagaatggcacaagatttttcaactagagcacttttagtagatggtcatggtaactttggttctgttgatggggattcaccagctgctatgcgttatacagaagctaaaatgagtaaattatcattagaactactgagagatattgaaaaggaaactgtagactttaaaccaaactttgatgagtcgttaaaagagccttcagtattgccagctagatatcctaatttattagtaaatggctcaaatggtatagctgttggtatggcaacttcaatacctccacataatttagcagaagtaattgatgcaactgtatatttgatagataatccagagtgtagtgtagatgatttaataaaatttgttcaaggaccagatttccctacagctgcaattataatgggaaaagaaagtatagcagaagcatacagaactggaagaggaaaagttaaagttaggtctagagcttttatagaagaactaccaaaaggaaaacagcaaataatagttacagaaataccttatcaagtaaataaggctaaactggttgaaagaatagcagagttagttaaagaaaagagaatagaaggtatatcagacctaagagacgaaagtaatagaaatggtatgagaattgttatagaattaaagagggatgctaatgctaatatagtattaaataatttgtataaacattctcaaatggaagatacttttagtataataatgcttgcacttgtagatggtcagccaagagttttaaatcttaaacaaatattatatcattatattaaacatcaagaagatgttgttacaagaagaactaaatttgaactaaataaagctgaagcaagagcacatattttagaaggattaaagattgctttagataatatagatgctgttataagcttgataagagcttcaaagactgggcaagaagctaagataggtttaatagaaaaattcaaattaactgaaatccaagcacaagctatattagatatgagacttcaaagacttacaggtttagaaagagataagatagaagctgaatatgaagatttaatcaagaagataaatagattaaaagaaattttagctgatgaaagattacttttaaatgtaataaagaatgaaattacaataataaaagaaaattactctgatgagagaagaacagaaataagacatgctgaaggcgaaatagatatgagagatcttataagtgatgaagaaatagcaataactcttactcactttggatatataaaaaggcttccatctgatacttataagagtcaaaaaaggggtggaagaggtatttcagcacttacaactagagaagaagattttgtaaggcacttggtaactacaactactcatagtagactattattctttacaaataaaggtagagtatttaaattaaatgcatatgaaataccagaaggtaagagacaggctaaaggtactgctatagtgaatttacttcaattgtcagcagatgagaaaattgctactctaatacctattgatggtaatgatgaaaatgaatatttattacttgcaacgaaaaaaggtattgttaaaaagactaagagagaagagttcaaaaatataaataaatctggtcttattgctataggtttaagagatgatgatgagcttattggagtagaacttacagatggaaaacaagaagtacttttagtaactaaagaaggtatgtctataagatttgatgaaaatgatataagatatatgggtagaacagcaatgggtgtaaaaggtataactttaagtaaagaagattttgttgtgtctatgaacctttgcagtaaaggtacagatgtgttagttgtaagtaagaatggttttggaaagagaacaaatatagaagagtatagaagtcaaataagagctggtaaaggaattaaaacttataatatatctgaaaaaactggtacaattgtaggtgcagatatggtcaacgaagatgatgagataatgattataaattctgatggagttcttattagaataagagtcaatgaaatatcactgtttggaagagttacaagtggtgttaaattaatgaagacgaatgatgaagtcaatgtagtttcgattgccaaaataaatattgaagaagaataggataaatatcctattctttttgtataatgtagttagataaaaatttaaaattgaaaggagtaattgttatgtgcaataaaagaagttgtaaaaaaggtggatttttattattaggagctattttagggtttatatttggtatgttttttgcacctaaaaaaggttctgaactaagaaaagaaacaaaagagaagtttaatgatgtcaaagaaaatccaaaagaagttctacatgaaacatttaatgatgttaaagagagaataataaatttagtggacgatgataataatgaagaagatataaagatttcagaagaagatatagtaataagtaaaagctttgatgatgagggagatgttaactaatgaatgcatgggggtggcaaattggagcagtgttagtaggaagctctgctcttatagtagcaatttatttagctaaaactctaaacagcataaataaggttgttgaaaaggcatataagattgtagattataatgaaagacatatacaagatattgttgaaaatgcatcatcaatatcaaagggaatagatgatatagtttatgtaattaataaaatattgagtataggaaatatatttaaaattattaaaaggaaataggaggtttttacatgtctatgaatattgattcaaatttagattcacaaaataaattttggaatgtttgtcttgatggagaacttgatgtttctacagcagataaactaaaggaacatttacatgctttaatagaaaaaaatatgttagatgtaaagattaatcttaaagatttagattatatagactcaacaggcttaggagctatgataggtgtattaaaaaaattaaaaataaatgaaaaagagatatacatagtaaatcctaagagtaacgtaaaaaagatttttactataacaggtctagataaaatatttaaagtggagggataaactttggcttgtgagactataaagatggaaattactacaaatccagattatgttagtataataagattaacagcatctggaattgccaataagatgggttttccaatagatgatatagaagatataaaggtagcagtatctgaagcatgtacaaatgcaataaaacacagtaaagatgatgtgtttaatatagtatttaatattttagataatgcaattaatatagaaattcaagataatggaaaaggatatgatgttagctcaataagtacaccagatttagagaatccaaaagagagtggtcttggattgtttataattaaaactttaatggatgatgtagatattgaatcagaacataatcaagggacaaaaataaaaatgactaaatatttaggagttgatatttaatgaaaaatgtagctaatgctacacattacctaaatatggatacaaaagagctatttaatttatataataaaaataaaaatgtagacattagaaatattcttattgaaagacatctgtatttagcaagattgttagctaagaagtatataaacaaaggtgttgattttgaagatatatatcaagttgcttcattggcattaatttatgctattgatagatatgatgttgagaaaggatttgagttctccagctttgcgacaccaactatagtaggagaaataaaaaagtattttagagataaggtatggacacttagagtcccaagaagaatacaggaattaagcaaaaagataagtgatgcgaagattaaattagaacaagaaaataagaagcatccaaaggtaaaagatatagctgattatataggcgttagtgaagaagatgttttagaggctatggaggcttcttatggatatcaaccaatgtctttggattcatcaagtaatgatgattcagaggataaagatataactcttattgataagattggaaaagaagaaggtaactttggaagtatagagtatgaagattttattaataagtttattgaaactttaaatgaattagaagttaaaatttttaaagatagatttttctttgataaaacacaatctagtatagctaaagaactagggatatcacagatgactgtttctagactagagaaaaaggtagtagagaagctgaaaaaagaatatgaaaaaaatttataaaaaaatataaaaaaagtattgacctactgttttaaagatggtatagtattacttgtccttgaaaaaaggaacaagaaataaacacgaacattgaaaattaaacagtaggttaatttatattaagaaacaaaccataaagccagatattttgataacaatagtatctgagcctgataaacttttatttgagagtttgatcctggctcaggatgaacgctggcggcgtgcctaacacatgcaagttgagcgatttacttcggtaaagagcggcggacgggtgagtaacgcgtgggtaacctaccctgtacacacggataacataccgaaaggtatgctaatacgggataatatatttgagaggcatctcttaaatatcaaaggtgagccagtacaggatggacccgcgtctgattagctagttggtaaggtaacggcttaccaaggcgacgatcagtagccgacctgagagggtgatcggccacattggaactgagacacggtccaaactcctacgggaggcagcagtggggaatattgcacaatgggcgaaagcctgatgcagcaacgccgcgtgagtgatgaaggccttcgggtcgtaaaactctgtcctcaaggaagataatgacggtacttgaggaggaagccccggctaactacgtgccagcagccgcggtaatacgtagggggctagcgttatccggatttactgggcgtaaagggtgcgtaggcggtctttcaagtcaggagtgaaaggctacggctcaaccgtagtaagctcttgaaactgggagacttgagtgcaggagaggagagtggaattcctagtgtagcggtgaaatgcgtagatattaggaggaacaccagttgcgaaggcggctctctggactgtaactgacgctgaggcacgaaagcgtggggagcaaacaggattagataccctggtagtccacgctgtaaacgatgagtactaggtgtcgggggttacccccttcggtgccgcagctaacgcattaagtactccgcctgggaagtacgctcgcaagagtgaaactcaaaggaattgacggggacccgcacaagtagcggagcatgtggtttaattcgaagcaacgcgaagaaccttacctaagcttgacatcccaatgacatctccttaatcggagagttcccttcggggacattggtgacaggtggtgcatggttgtcgtcagctcgtgtcgtgagatgttgggttaagtcccgcaacgagcgcaacccttgtctttagttgccatcattaagttgggcactctagagagactgccagggataacctggaggaaggtggggatgacgtcaaatcatcatgccccttatgcttagggctacacacgtgctacaatgggtagtacagagggttgccaagccgtaaggtggagctaatcccttaaagctactctcagttcggattgtaggctgaaactcgcctacatgaagctggagttactagtaatcgcagatcagaatgctgcggtgaatgcgttcccgggtcttgtacacaccgcccgtcacaccacgggagttggagacgcccgaagccgattatctaaccttttggaagaagtcgtcgaaggtggaatcaataactggggtgaagtcgtaacaaggtagccgtatcggaaggtgcggctggatcacctcctttctaaggagaattacctactgtttaattttgagggttcgtttttacgaatactcaaaattagcacttttagcaacagaataaactgaacgcatgtgaagtttgtttgttggcgctgtgcgttagcactttaagcaacggaatttattcgttggcgccgtgctttagcactttgaaaactgcatatatatttagtgatatgacatctaatttgtaatatataaagctgataactttttaaaattatcgaagttgatagcttctaatctatcaaacctttttaactggtcaagttattaagggtgcagggcggatgccttggcactaggagccgatgaaggacgtgataagctgcgataagcttcggggagttgcacgtaaactttgatccgaagatttccgaatgaggaaactcacttagagtaatgtctaagtatcattaagtgaatacatagcttaatgaggggaactcagggaactgaaacatctaagtacctgaaggaagagaaagaaattcgattccgtaagtagcggcgagcgaacgcggattagcccaaaccaataaagttttctttattggggttgcggacatatcataacgaagaggtatcgtaattgaagaggtttggaaagacccaccacagaaggtaatagtcctgtatgttaaacgagaagacttcagatatgatccagagtaccacgggacacgtgaaaccctgtgggaagcaggagggaccaccctccaaggctaaatactacctagtgaccgatagcgtatagtaccgtgagggaaaggtgaaaagaaccccgggaggggagtgaaatagaacctgaaaccctgcacttacaagctgtggaagcacatttcttgtgtgaccgcgtactttttgtagaacgggccaacgagttacgttaagtagcaaggttaagcacttaaggtgcggagccgtagcgaaagcgagttttaactgagcgttcagttacttgacgtagacccgaaaccgggcgacctacccatgagcaggatgaagcgaaagtaaaatttcgtggaggtccgaacccacgagcgttgaaaagctcggggatgacttgtgggtagcggtgaaattccaatcgagcccggagatagctggttctccccgaaatagctttagggctagcctcaaggtgagagatacggaggtagagcactgaatgtcctagggggtattgcacctaccgaagactatcaaactccgaatgccgtcatcttatacttgggagtcagactgtgggtgataagattcatagtcgaaagggcaacagcccagatcgtcagctaaggtccctaaatgtaagttaagtggtaaaggatgtgggattgcacagacaaccaggatgttggcttagaagcagccactcattcaaagagtgcgtaatagctcactggtcgagtgatcctgcgccgaagatttccggggctaaaacttactaccgaagctacggcatcagtaatgatgggtaggggagcttcccatacgggttgaagcatgaccgtaaggacatgtggacagtatgggagtgagaatgttggcatgagtagcgagatgtgggtgagaatcccacaggccgtaaacccaaggtttccaggggaaggttcgtccgccctgggttagtcgggacctaagctgaggccgaaaggcgtaggtgatggacaacaggttgatattcctgtactaccgataaccgtttgagagaagggatgacacagtaggataagctaagcacactgttggttatgtgtgcccaagcattgaggcagtcaaagtaggcaaatccgctttgataatgctgggatgtgatggggagcgaaatttagtagcgaagtagctgatttcacactgtcaagaaaagtctctatcgaggttaaaggtacccgtaccgcaaaccgacacaggtgggtgaggagagtatcctaaggccagcgagagaactgttgttaaggaactcggcaaaatgaccccgtaacttagggataaggggtgccaccatcaggtggccgcagagaataggcccaagcgactgtttaccaaaaacataggtttctgctaagtcgcaagacgatgtataggagctgacgcctgcccggtgctggaaggttaaggggatctgttagagcaatcgaagcagtgaacttaagccccagtaaacggcggccgtaactataacggtcctaaggtagcgaaattccttgtcgggtaagttccgacccgcacgaaaggcgtaacgatttgggcactgtctcaacaacagactcggtgaaattgtaattccggtgaagatgccggatacctgcgacaggacggaaagaccccatggagctttactgtagcttgacattgggtcttggtactacatgtacaggataggtgggaggctttgaaaccaggacgccagttttggcggagccatccttgggataccacccttgtagtactgggactctaaccataggccatgaatctggtcttgggacactgtcaggtgggcagtttgactggggcggtcgcctcccaaaaggtaacggaggcgctcaaaggttctctcagtacggtcggaaatcgtacgtagagtgtaaaggcaaaagagagcttgattgcaagacatacaggtcgagcaaggatgaaaatcggacttagtgatccggtggttctgcgtggaagggccatcgctcaacggataaaagctaccctggggataacaggcttatctcccccaagagtccacatcgacggggaggtttggcacctcgatgtcggctcatcacatcctggggctgtagtaggtcccaagggttgggctgttcgcccattaaagtggtacgcgagctgggttcagaacgtcgtgagacagttcggtccctatccgtcgcaggcgtaggaaatttgagaagacctgtccttagtacgagaggaccgggatggacgtacctctggtgtaccagttgtcctgccaagggcatggctgggtagctatgtacggaatggataagcgctgaaagcatctaagcgcgaagccaacttcaagataagatttcccaccgcaagggtaagaccccagaaagactatctggttgataggtcgaaggtgtaagtgcagcaatgtatttagcttatcgatactaataggtcgaggacttgaccaatattatttgatgtcattcattaagatatatgtgcagtttttagagtgctaaatctatatttttaaacttgtcaaaacttatggatttttaatagttttataaggcaaaaaatcgaataaaaaaagtattgacacaataagacaaagatgttattataatacttgtcttagaaaaaaagttaaatgaaaatttagacaataatctggttataatagcagagaggatacacctgttcccattccgaacacagaagttaagctctctagcgctgatggtacttggtgggaaactgcctgggagagtaggacatagccaggtgatgtgccgaagtggcggaactggcagacgcacaggacttaaaatcctgcgggacttacctctcgtaccggttcgattccggtcttcggcaccacaaattattgtgggccattagctcagttggttagagcgcccggctcataaccggtaggtctggggttcgagtccctgatggcccaccacaataatttaaagaactttgaaaattaaacagtaggttaatttataaacaagaaacaaaccataaagccagatattttgataacaatagtatctgagcctgataaacttttatttgagagtttgatcctggctcaggatgaacgctggcggcgtgcctaacacatgcaagttgagcgatttacttcggtaaagagcggcggacgggtgagtaacgcgtgggtaacctaccctgtacacacggataacataccgaaaggtatgctaatacgggataatatatttgagaggcatctcttgaatatcaaaggtgagccagtacaggatggacccgcgtctgattagctagttggtaaggtaacggcttaccaaggcgacgatcagtagccgacctgagagggtgatcggccacattggaactgagacacggtccaaactcctacgggaggcagcagtggggaatattgcacaatgggcgaaagcctgatgcagcaacgccgcgtgagtgatgaaggccttcgggtcgtaaaactctgtcctcaaggaagataatgacggtacttgaggaggaagccccggctaactacgtgccagcagccgcggtaatacgtagggggctagcgttatccggatttactgggcgtaaagggtgcgtaggcggtctttcaagtcaggagtgaaaggctacggctcaaccgtagtaagctcttgaaactgggagacttgagtgcaggagaggagagtggaattcctagtgtagcggtgaaatgcgtagatattaggaggaacaccagttgcgaaggcggctctctggactgtaactgacgctgaggcacgaaagcgtggggagcaaacaggattagataccctggtagtccacgctgtaaacgatgagtactaggtgtcgggggttacccccttcggtgccgcagctaacgcattaagtactccgcctgggaagtacgctcgcaagagtgaaactcaaaggaattgacggggacccgcacaagtagcggagcatgtggtttaattcgaagcaacgcgaagaaccttacctaagcttgacatcccaatgacatctccttaatcggagagttcccttcggggacattggtgacaggtggtgcatggttgtcgtcagctcgtgtcgtgagatgttgggttaagtcccgcaacgagcgcaacccttgtctttagttgccatcattaagttgggcactctagagagactgccagggataacctggaggaaggtggggatgacgtcaaatcatcatgccccttatgcttagggctacacacgtgctacaatgggtagtacagagggttgccaagccgtaaggtggagctaatcccttaaagctactctcagttcggattgtaggctgaaactcgcctacatgaagctggagttactagtaatcgcagatcagaatgctgcggtgaatgcgttcccgggtcttgtacacaccgcccgtcacaccacgggagttggagacgcccgaagccgattatctaaccttttggaagaagtcgtcgaaggtggaatcaataactggggtgaagtcgtaacaaggtagccgtatcggaaggtgcggctggatcacctcctttctaaggagaattgcctactgtttaattttgaaagttctttacgaactttatatatgggggtgtagctcagttgggagagcacttgccttgcaagcaaggggtcaggagttcgactctcctcatctccaccatttaagagtatattacttaaatctttgatttacttagtagcctcttacaatgcacttatagcttaaatttatacaagctttgtgcgttagcactttaagcaacgggatttattcgttggcgacgtgttttagcactttgaaaactgcatatatatttagtgatatgacatctaatttgtaatatataaagctgataactttttaaaattatcgaagttgatagcttctaatctatcaaacctttttaactggtcaagttattaagggtgcagggcggatgccttggcactaggagccgatgaaggacgtgataagctgcgataagcttcggggagttgcacgtaaactttgatccgaagatttccgaatgaggaaactcacttagagtaatgtctaagtatcattaagtgaatacatagcttaatgaggggaactcagggaactgaaacatctaagtacctgaaggaagagaaagaaattcgattccgtaagtagcggcgagcgaacgcggattagcccaaaccaataaagttttctttattggggttgcggacatatcataacgaagaggtatcgtaattgaagaggtttggaaagacccaccacagaaggtaatagtcctgtatgttaaacgagaagacttcagatatgatccagagtaccacgggacacgtgaaaccctgtgggaagcaggagggaccaccctccaaggctaaatactacctagtgaccgatagcgtatagtaccgtgagggaaaggtgaaaagaaccccgggaggggagtgaaatagaacctgaaaccctgcacttacaagctgtggaagcacatttcttgtgtgaccgcgtactttttgtagaacgggccaacgagttacgttaagtagcaaggttaagcacttaaggtgcggagccgtagcgaaagcgagttttaactgagcgttcagttacttgacgtagacccgaaaccgggcgacctacccatgagcaggatgaagcgaaagtaaaatttcgtggaggtccgaacccacgagcgttgaaaagctcggggatgacttgtgggtagcggtgaaattccaatcgagcccggagatagctggttctccccgaaatagctttagggctagcctcaaggtgagagatacggaggtagagcactgaatgtcctagggggtattgcacctaccgaagactatcaaactccgaatgccgtcatcttatacttgggagtcagactgtgggtgataagattcatagtcgaaagggcaacagcccagatcgtcagctaaggtccctaaatgtaagttaagtggtaaaggatgtgggattgcacagacaaccaggatgttggcttagaagcagccactcattcaaagagtgcgtaatagctcactggtcgagtgatcctgcgccgaagatttccggggctaaaacttactaccgaagctacggcatcagtaatgatgggtaggggagcttcccatacgggttgaagcatgaccgtaaggacatgtggacagtatgggagtgagaatgttggcatgagtagcgagatgtgggtgagaatcccacaggccgtaaacccaaggtttccaggggaaggttcgtccgccctgggttagtcgggacctaagctgaggccgaaaggcgtaggtgatggacaacaggttgatattcctgtactaccgataaccgtttgagagaagggatgacacagtaggataagctaagcacactgttggttatgtgtgcccaagcattgaggcagtcaaagtaggcaaatccgctttgataatgctgggatgtgatggggagcgaaatttagtagcgaagtagctgatttcacactgtcaagaaaagtctctatcgaggttaaaggtacccgtaccgcaaaccgacacaggtgggtgaggagagtatcctaaggccagcgagagaactgttgttaaggaactcggcaaaatgaccccgtaacttagggataaggggtgccaccatcaggtggccgcagagaataggcccaagcgactgtttaccaaaaacataggtttctgctaagtcgcaagacgatgtataggagctgacgcctgcccggtgctggaaggttaaggggatctgttagagcaatcgaagcagtgaacttaagccccagtaaacggcggccgtaactataacggtcctaaggtagcgaaattccttgtcgggtaagttccgacccgcacgaaaggcgtaacgatttgggcactgtctcaacaacagactcggtgaaattgtaattccggtgaagatgccggatacctgcgacaggacggaaagaccccatggagctttactgtagcttgacattgggtcttggtactacatgtacaggataggtgggaggctttgaaaccaggacgccagttttggcggagccatccttgggataccacccttgtagtactgggactctaaccataggccatgaatctggtcttgggacactgtcaggtgggcagtttgactggggcggtcgcctcccaaaaggtaacggaggcgctcaaaggttctctcagtacggtcggaaatcgtacgtagagtgtaaaggcaaaagagagcttgattgcaagacatacaggtcgagcaaggatgaaaatcggacttagtgatccggtggttctgcgtggaagggccatcgctcaacggataaaagctaccctggggataacaggcttatctcccccaagagtccacatcgacggggaggtttggcacctcgatgtcggctcatcacatcctggggctgtagtaggtcccaagggttgggctgttcgcccattaaagtggtacgcgagctgggttcagaacgtcgtgagacagttcggtccctatccgtcgcaggcgtaggaaatttgagaagacctgtccttagtacgagaggaccgggatggacgtacctctggtgtaccagttgttctgccaagggcatggctgggtagctatgtacggaatggataagcgctgaaagcatctaagcgcgaagccaacttcaagataagatttcccaccgcaagggtaagaccccagaaagactatctggttgataggtcgaaggtgtaagtgcagcaatgtatttagcttatcgatactaataggtcgaggacttgaccaaattatttgatgtccattcaataaaatatatatgtagtttttagagtgttaactctaaagaaactagtattactagattctaaaaacttaatagaaatattaagcataaagattatgtggttacaatagcagagaggatacacctgttcccattccgaacacagaagttaagctctctagcgctgatggtacttggtgggaaactgcctgggagagtaggacgtagccacgtaatcttttttatttgcaataaagtttaatattaaatagaatataaaatcaatattgatttataataagataaaatatagaattatatagtataggtaaagtttttgatttagaaagaaggtgtaatatgaattctgatgaaagaagaagcaaattaatagatattttaaaagaatctaagtgccctgtaaaaggtggaatgctagctgagatattaaatgtaagtaggcaagtaatagtacaagatatagcccttataagagctagaggatttgaaataatagctacacctcaaggatatataatatataatcaaccatattttacaaagcaaataaaatgtaagaatcacaggaattctaaagaaatttatgatgaattaaagattattgtagatttaggtggaattgttaaggatgtcatcgtaaatcatccaacatatggtcagataactgcagagcttaatattcactctaaaatggatatagataattttatgaagaaggttgagacaaatgaatttaaacagttatcagttctaactgaatgtagtcatattcatacaattgagacattaaaagaagagactatagaagttataacaaaagaattagaggacagaggaatattatcataaggaggagttaaatgaattttttatcattagctaaggctgcttcaacaaatagtaatataactaaaagaactttagaaaatatgcttaataactttagtgataatataccaaatattatatatgcaataatcgtatttgtaataggtatctatatatctaagatagtaagaaagatggtttcaaggtttttaatcaaatatggaatgagtaaaggtgtaaataatttcattgtatatggaatatacatatctatgttatctattatatcattgataagcttgggtgttatagggatacaaactacatcagttgtagctgtattaggagctgctggatttagtataggtttagcatttaaagaaatattatcaaatttaggttcaggtatgattattttattttttaagccatttaatataggtgattatattcaaggctcaggtgtagaaggcacagtttctgatatacaaatatttagtactgttcttaaaaccccagataataaaaccataattataccaaactttcaattgacaagtaacaatataattaattacacacatcaaaataaaagaaggatagatttttcatataatatttcatatgatagtgatattgatgtagttaagtccatattgaatgaaatttttataaatgaaaaaaggatattggatgacccaaaaccaattataggtttaaactctataggaaacaacactatgcaaatagttgctagaccatgggttaaaactgatgattactgggatgtttactttgatgtaatggaaaaagtcaaaaataaatttgacgaaaataatataaaagttccatttgttccttcctcgttattatttaataatatgagcaattcaaatacaatggataaaagatagaatttcaattaagtaaaaaagtgaatttaatataaaaaattaaagaaaattctaaaaaaatttgaataatagtattgaaagatgttaatatatataatataatgattatcaaataaaacaattagttaaaaagcggtgaaggaaaatagtaaaaaacagattgtattcagagaatgagtggatggtgagaactcattacaatggtttttgaatctactctagagcttctagttaaagctagacggtttacctacgttataggtctgagaggattatacgttttagtataatcaattagggtggcaacgcggataaaagattttcgtcccttttatagggtaaacggaggtctttttttatttttcaaatttgtttaaattaaaagtttacagctagaatacttgtaaattaattggaattataatttatattatcaaaattattaggaggaattaatatgttagatattaaaagaataagagaaaatctagatgatatcaaaaaagctatggaaagaagaggtgaaagagaatttgaccttgatgctgtagtggaactagataataaaagaagagaaatacttcaagaagttgaagttatgaaaaatgagttaaatgtaaattctaaaaaaatacctcaattaataaaagaaggaaaagatgtaacagaagaaaagacaagattgaaagagttatcagataagataaaaggtattgatgagaaagtaaaagaagtagaagcaaaaatggaatatacattaatgagaataccaaatgttcctcatccagaggtaccacaaggtgaaacagatgaagacaatgttcaaataagaacttggggagaacctactaaatttgattttgagtataaagcgcattgggatatagggacaggtctaggtattttagattttgaaagagcagggaaaataactgggtcaaggtttactttatataggggattaggagctagattagaaagatctttaatgaatttctttttaaatactcatacagctaagcatggctatacagaagtcttacctccatttatggccaatagaaatagttttatagggactggtcaacttcctaaatttgaagaagatatgtttaaaatagaaggattagagtatttcttaataccaacagctgaagttcctgttactaatatacatgctaatgaaatattagatgttgcagagcttccaattaaatactgtgcatatactccttgttttagatctgaagcaggttcagcaggaagagatacaagaggtttagttagacaacatcaatttaataaagttgaattagttaaatttgttaaaccagaagattcttataatgaattagaatcattaactcatgatgctgaaactatgttacaaatgttaggtcttccatatagagttgtaaaaatatgtacaggagatttgggatttacagctgcatttaaatatgatttagaagtttggatgccaagttacaatagatatgtagaaatatcttcttgttcaaattttgaagatttccaagcaagaagagcaggaataagatttaaaagagataaaaaatcaaaagcagaatatgttcatacattaaatggttctggattagcgataggaagatgtttggctgctatattagaaaattatcagcaggcagatggttctgtagtagttccagaagaattaagaccttatatgggtgttgatgttataaaataaatttatattaattgtatatgtagagtatgctttgatgaagagaatatattatgagtaaacaataaataaaaaaactatgaaattattataaatattaatttcatagtttttttatgttaatttacacagcagaattttcatcataaaacactaaatatttttataaaacactcttgtatgaatatctaaaaattattttagaactaattaaaaaaaatatcgctatatatagtaataattaaataaacaaaataaaattaagttgaattataaaatgaattatgataagataagtttgttataagttttgggaggaattatggaaagttcattttatatgaaagaagcattaaaagaagcatataaagcatataataaaaaagaaacaccaataggtgctattatagttaaagataatcaaataatagctagagctcataaccttacagaaacgttaaaagactctacggcacatgcagaaattttagcgataaaacaagcatcagaaaaattaggtggttggaggttgactgattgtgatttatatgttacaatggaaccttgcataatgtgtagtggcgcaatagttaattctagaataaaaaagcttataatagggacaagacatgtaaaaaattcatatatagaaaaacagcatgagtttaaattagattattttaataataataatgtaaaagtagcttttgatgttttgcaagaagaatgctcgatcatattgcaagaattttttaaggcattgagaaaaagagattaaggagagatggtcgagtggtcgaaggcgctcgcctggaaagcgagtatatgggtaaaactgtatcgtgggttcaaatcccactctctccgccagaaacaatgaaagtaattaaatatggttgtaattttgctgtactagatggggaggtagcggtgccctgtaacctgcaatccgctatagcaggattgaattccatctaaaggcttattttctgtagggccgccctaaataagtggtgttgatgcttaggtcctgcgcaatgaaagctcatgaaccccgtcagatccggaaggaagcagcggtaagtgatcacttttgtgtgccgtgggggtgcctaagttgagctaactgttttggtaacgcctatggaattaagtcgatagatggtgtacagcatttaatatataaaagactaatcccttagataatgagggatttttttattaattttgctaaagagaggtaaaaagatgcataaagcattatatagagcatatagaccacaaaaatttgaagatgttattggtcaagatcatattattaagactttaaaaaatcaaatatatagtgataatataggacatgcttatttgttttgtggaacaagaggtactggtaaaacatctactgcaaagattttttcaagagcagtaaactgtttgaataaaataaatgaagaaccgtgtaatgagtgtgagatatgtgaatctgtattaaaagataatacaatggatgttgtagaaatagatgcagcttcaaataatagtgtagatgatataagagagcttagagaaagtgtgaaatattctccagccaatgctaaatataaagtatatataatagatgaagttcatatgttgtctcaaggagcttttaatgcattattaaagaccttagaggaacctccatcatatgtaatttttatattagcaactacagagcctcacaaaatacctgcaaccattttatcaagatgccaaagatacgattttaaaagagttacagttaaagatatgacccttagaatgaaaaagatttgtgaagatgaaggaattgatatagatgataaagctcttaatttaatagctagaaattctcaaggagctcttagagatgcacttagtatattagaccaatgtatgtcttttggagaaagtaagatagattataaagatgttgttgaattaatgggaagcgtaaatatagaacaattatttgaattgtctcaatgtattgtagagcaggacactaaaaagtctcttgagatattaaatgaatttgtcttatggggcaaagatataagaaatcttataaatgacttaattgatcattttagaaatttaatggtatgtaaggtttcatcagaattggatgaaataatttcattaccagaagaaactatagaacaacttaaaattcagtctaaaaatatagatataaatgatttaataaggattttaaatatattatcaataactcaggatgatataaagtcatcttcaaatccaagggttttagtggaaataaccataatgaaaattgctcaaccaatgtttgatgaaagtaaagaagctcttataaaaagagttgagaacttagaaaaaatgattgaactggggaactttaagtctgaaaaaattgggaataataaagaaaaagagtatgaggtcgatagagaaatagatgtaaaacaagaaaatgtagtttatgaagatgtaaaaaatgaggacgttatacttatagagtcatcttggaagaatatacttaaacaaattaaaaaagataaaaaaatgccaatatacgcactcttaagtgaagtaaaaagttttaatgtatattctaatatgttgtatgttatatttgatgataaatttgattttgcaaaaactagactgagctctcaagatacaataaattatttagaaaaaacaataagagatgttttaaatagaagttttaatgtaaaaatagtactgacatcagaagttaaagatataaatcttgaagttaaagagaaaaaggacattggtgaggagatattaaagaacatagtgagtgaagagatattagaaataaaatatagtattgatgaaaatgagagtaaataataaaatactattatgatataataataaaatgaaaataagtttaggaggaatagtgtttatggctaaaaaaggttttggaggcggaatgatgcctggtggtggaaatatgaacaacttgttaaagcaggctcaaaaaatgcaagaaaatatgcaaaaagctcaacaagagttagaaagtaaagaagtagaagcttcagttggtggaggagcagttactgtaaaagttaatggtaaaaaagaagttatagatataactatcaagccagaagtagttgatccagatgatatagaaatgctacaagatttagttttaagtgcagtaaatcaagcattgagaaatattgatgatatacaagcaagtcaaatgagtaaggtaactggaggtatgaatatacctgggttattctagtaggtggtatttatgcaagtttatacaggtcccataacgagacttatagaggaattttcaaagcttcctggagtaggaagaaagactgctcaaagattggcttttcatattattaatatgaatactaatgatgtggaagctttatctaaagcgattatagatgcaaaaagagaaataagatattgctcaatttgttgtaatataacagatacagacccatgtagcatgtgttcaaataaaagtagagattcaagtgttatatgtgttgtggaagatccaagagatgtagcagctatggagagaacgagagagtttaaaggacagtatcatgtattaaatggagtaatttctccaatggatggaattggaccagatatgttaaaaataaaggaacttatccaaagacttggcaatcaggaagtcaaagaaataataatggcaacaaatcctactattgaaggtgaagcgacagccatgtatattgctaggttagtaaaaccaatgggaatcaaagtcactcggatagctcatggtcttcctgttggaggcgatttagagtatgcagatgaggtcacaatatcaaaagcactagaaggcagaagagaaatataaaaatcgaggttaatacctcgatttttgtagttttttgagttaaattcaaattaattttgatttagatttattgaataaatttcttctgtattgtataatttgttgtataaatcatttaaaaattttgataggggtgcaacatgaaaccaattatgaacttagaagaacataatgcaatgaaagaaaaaagagttaaaaaaatgaaatcaaaagataaacctaaatatgatgattttgaggatataagtttttctaataagaaaaaaactaaaaaaaatgtacgaaataaaaatgctgaatttagaaataattataaaaattatcagtatgattatgaagaagacttttatgaaccaatttaatattaaataattagaaaataaaaaatccctaatagataatatatatactatagggattttatttattttatcaaccagaaattatatttaaaattaaattagctatattttgggctgaatttgactttcttattgatttaacatttctttttagcatttctaatctgctagggtcatctattagaacttttagtaatattgacaagttatatttttttgtagttctaagtgctgcaccacaattagataagaaatcaagattctcttcttcctgacctggtatataataaggaactatcataggtacatcttttaaaagagcctcagttgtagtaagtccaccaggtttgcttactaatacatctatagaagctaaaatatcattcatcttatcagtgtatccaagaacacatacatttttatcatgataacgagacataagttttttttcgattttttcttttaggctttcattcttaccagtaattacaagtatttgaaaatctctatcagtatccagtaattcatcaagtgtctcttttatatttccagccccaaagctaccccccataagtaaaacagttaatttatcaggagataaattcaactcagaaagaacaatatctttatctctgtgagagagaaaagatttttcaacagggattccaaatgttctaattttactcggtccaactccatcaaacaccaataattcttttacatattcatgaccaacaatatagtaatcaatttcattttgtatccatgtagaatgagtagtataatcggttaatacagaaataagcggaggaacattaatggtatttgtataatgtttataaaaatgctctgtgtaagcatttgattcattattatgtaaattaaagttttttttcaatgtgcttagagcaatcattggaaaaggatgtgttcctataatcaagtctggtttttcgcttctaataagctttttaaattttttagccatgaatgttattagtagattatctttaaattcattttttgacaaaagatttgtttcagataatctatatacacttccataggctttgggagtatatatagcagatttttcgtatcctcttgaaattattttatccattgtattattaactaatttcaaactatctattatttcacattcaattggctctccatcaagtgttttggaagtaagttcttctttaatagctagagcagccctattatgcccaccaccagtggaagcagacattattaatacttttttgctcataataaaatcctcctaaaatgtagcatagtatttatattgtattatattttgatatataaaaactgtctttgtgaataaggttattgataaattatttttaatattaatctaatacaagattgcaaaaattacaagtgaaagaaatgtaaattaattttatcaaatatgttatattaaaaatattcttgtaaataaaaaatttaaatatagaataaaaaggaaaatagagcatagaatatatattagttttatgaaataaataggtttacttagcattaagttttaaaaattaaatataaagaatacatgataaataaaaaatttaaaaaaagtaaaaaattatattgactagaatagataaagatgatatagtattacttgtccttgaaaaaaggaaaaagaaataaacacgaacattgaaaattaaacagtaggttaatttatattaagaaacaaaccataaagccagatattttgataacaatagtatctgagtctgataaacttttatttgagagtttgatcctggctcaggatgaacgctggcggcgtgcctaacacatgcaagttgagcgatttacttcggtaaagagcggcggacgggtgagtaacgcgtgggtaacctaccctgtacacacggataacataccgaaaggtatgctaatacgggataatatatttgagaggcatctcttgaatatcaaaggtgagccagtacaggatggacccgcgtctgattagctagttggtaaggtaacggcttaccaaggcgacgatcagtagccgacctgagagggtgatcggccacattggaactgagacacggtccaaactcctacgggaggcagcagtggggaatattgcacaatgggcgaaagcctgatgcagcaacgccgcgtgagtgatgaaggccttcgggtcgtaaaactctgtcctcaaggaagataatgacggtacttgaggaggaagccccggctaactacgtgccagcagccgcggtaatacgtagggggctagcgttatccggatttactgggcgtaaagggtgcgtaggcggtctttcaagtcaggagtgaaaggctacggctcaaccgtagtaagctcttgaaactgggagacttgagtgcaggagaggagagtggaattcctagtgtagcggtgaaatgcgtagatattaggaggaacaccagttgcgaaggcggctctctggactgtaactgacgctgaggcacgaaagcgtggggagcaaacaggattagataccctggtagtccacgctgtaaacgatgagtactaggtgtcgggggttacccccttcggtgccgcagctaacgcattaagtactccgcctgggaagtacgctcgcaagagtgaaactcaaaggaattgacggggacccgcacaagtagcggagcatgtggtttaattcgaagcaacgcgaagaaccttacctaagcttgacatcccaatgacatctccttaatcggagagttcccttcggggacattggtgacaggtggtgcatggttgtcgtcagctcgtgtcgtgagatgttgggttaagtcccgcaacgagcgcaacccttgtctttagttgccatcattaagttgggcactctagagagactgccagggataacctggaggaaggtggggatgacgtcaaatcatcatgccccttatgcttagggctacacacgtgctacaatgggtagtacagagggttgccaagccgtaaggtggagctaatcccttaaagctactctcagttcggattgtaggctgaaactcgcctacatgaagctggagttactagtaatcgcagatcagaatgctgcggtgaatgcgttcccgggtcttgtacacaccgcccgtcacaccacgggagttggagacgcccgaagccgattatctaaccttttggaagaagtcgtcgaaggtggaatcaataactggggtgaagtcgtaacaaggtagccgtatcggaaggtgcggctggatcacctcctttctaaggagaattacctactgtttaattttgagggttcgtttttacgaatactcaaaattagcacttttagcaacagaataaactgaacgcatgtgaagtttgtttgttggcgctgtgcgttagcactttaagcaacggaatttattcgttggcgccgtgctttagcactttgaaaactgcatatatatttagtgatatgacatctaatttgtaatatataaagctgataactttttaaaattatcgaagttgatagcttctaatctatcaaacctttttaactggtcaagttattaagggtgcagggcggatgccttggcactaggagccgatgaaggacgtgataagctgcgataagcttcggggagttgcacgtaaactttgatccgaagatttccgaatgaggaaactcacttagagtaatgtctaagtatcattaagtgaatacatagcttaatgaggggaactcagggaactgaaacatctaagtacctgaaggaagagaaagaaattcgattccgtaagtagcggcgagcgaacgcggattagcccaaaccaataaagttttctttattggggttgcggacatatcataacgaagaggtatcgtaattgaagaggtttggaaagacccaccacagaaggtaatagtcctgtatgttaaacgagaagacttcagatatgatccagagtaccacgggacacgtgaaaccctgtgggaagcaggagggaccaccctccaaggctaaatactacctagtgaccgatagcgtatagtaccgtgagggaaaggtgaaaagaaccccgggaggggagtgaaatagaacctgaaaccctgcacttacaagctgtggaagcacatttcttgtgtgaccgcgtactttttgtagaacgggccaacgagttacgttaagtagcaaggttaagcacttaaggtgcggagccgtagcgaaagcgagttttaactgagcgttcagttacttgacgtagacccgaaaccgggcgacctacccatgagcaggatgaagcgaaagtaaaatttcgtggaggtccgaacccacgagcgttgaaaagctcggggatgacttgtgggtagcggtgaaattccaatcgagcccggagatagctggttctccccgaaatagctttagggctagcctcaaggtgagagatacggaggtagagcactgaatgtcctagggggtattgcacctaccgaagactatcaaactccgaatgccgtcatcttatacttgggagtcagactgtgggtgataagattcatagtcgaaagggcaacagcccagatcgtcagctaaggtccctaaatgtaagttaagtggtaaaggatgtgggattgcacagacaaccaggatgttggcttagaagcagccactcattcaaagagtgcgtaatagctcactggtcgagtgatcctgcgccgaagatttccggggctaaaacttactaccgaagctacggcatcagtaatgatgggtaggggagcttcccatacgggttgaagcatgaccgtaaggacatgtggacagtatgggagtgagaatgttggcatgagtagcgagatgtgggtgagaatcccacaggccgtaaacccaaggtttccaggggaaggttcgtccgccctgggttagtcgggacctaagctgaggccgaaaggcgtaggtgatggacaacaggttgatattcctgtactaccgataaccgtttgagagaagggatgacacagtaggataagctaagcacactgttggttatgtgtgcccaagcattgaggcagtcaaagtaggcaaatccgctttgataatgctgggatgtgatggggagcgaaatttagtagcgaagtagctgatttcacactgtcaagaaaagtctctatcgaggttaaaggtacccgtaccgcaaaccgacacaggtgggtgaggagagtatcctaaggccagcgagagaactgttgttaaggaactcggcaaaatgaccccgtaacttagggataaggggtgccaccatcaggtggccgcagagaataggcccaagcgactgtttaccaaaaacataggtttctgctaagtcgcaagacgatgtataggagctgacgcctgcccggtgctggaaggttaaggggatctgttagagcaatcgaagcagtgaacttaagccccagtaaacggcggccgtaactataacggtcctaaggtagcgaaattccttgtcgggtaagttccgacccgcacgaaaggcgtaacgatttgggcactgtctcaacaacagactcggtgaaattgtaattccggtgaagatgccggatacctgcgacaggacggaaagaccccatggagctttactgtagcttgacattgggtcttggtactacatgtacaggataggtgggaggctttgaaaccaggacgccagttttggcggagccatccttgggataccacccttgtagtactgggactctaaccataggccatgaatctggtcttgggacactgtcaggtgggcagtttgactggggcggtcgcctcccaaaaggtaacggaggcgctcaaaggttctctcagtacggtcggaaatcgtacgtagagtgtaaaggcaaaagagagcttgattgcaagacatacaggtcgagcaaggatgaaaatcggacttagtgatccggtggttctgcgtggaagggccatcgctcaacggataaaagctaccctggggataacaggcttatctcccccaagagtccacatcgacggggaggtttggcacctcgatgtcggctcatcacatcctggggctgtagtaggtcccaagggttgggctgttcgcccattaaagtggtacgcgagctgggttcagaacgtcgtgagacagttcggtccctatccgtcgcaggcgtaggaaatttgagaagacctgtccttagtacgagaggaccgggatggacgtacctctggtgtaccagttgttctgccaagggcatggctgggtagctatgtacggaatggataagcgctgaaagcatctaagcgcgaagccaacttcaagataagatttcccaccgcaagggtaagaccccagaaagactatctggttgataggtcgaaggtgtaagtgcagcaatgtatttagcttatcgatactaataggtcgaggacttgaccaatattatttgatgttattcattaagatatatgtgcagtttttagagtgttaactctatgtaaagtactaacttcaattgatgaagtatatatcgtaaaaacaattactatttagtacttcaaaactattgacatttaaaaataaagatgttaatataatacttgtcttataaataggcaatatgtggttataatagcaaagaggatacacctgttcccattccgaacacagaagttaagctctttagcgctgatggtacttggtgggaaactgcctgggagagtaggacgtagccacgtgaatattccaaggtagctcaatggtggagcaaccggctgttaaccggtaggctgtgggttcgagccccacccttggagccaaaaaaagccgaagtggcggaactggcagacgcacaggacttaaaatcctgcgggacttacctctcgtaccggttcgattccggtcttcggcacttataaaacaatatcgcggagtggagcagttggcagctcgtcgggctcataacccgaaggtcgtaggttcaagtcctgcctccgcaaccattaaaatggctcgttggtcaagaggttaagacaccgccctttcacggcggtaacaggggttcaattcccctacgagtcaccaattaaatatgcgggtgtagctcaatggtagagttctggccttccaagccagctgtgagggttcgatccccttcacccgctccaaaaatgggaccatagctcagctgggagagcacctgccttacaagcagggggtcacaggttcgagccctgttggtcccaccatttgcggcctggtagttcagttggttagaatgccagcctgtcacgctggaggtcgagggttcgaaccccttccaggtcgccaaaataaaatgctggtgtggctcaacggtagagcagctgacttgtaatcagcaggttgtaggttcgattcctatcaccagctccatgtaaaattaatacggaggatttcccgagcggccaaagggggcagactgtaaatctgttgtcatcgacttcggtggttcgaatccaccatcctccaccaaaaaatgcgcggatgtggcggaattggcagacgcactagacttaggatctagcgccattggcgtgggggttcgactcccttcatccgcaccatttttgtttgatatacatatataaattgtgggtgcatagctcagctggatagagcaacgcccttctaaggcgtgtgtccggggttcgaatccctgtgcgctcaccacatatattggggattagccaagtcggtaaggcacatgactttgactcatgtatgcgtaggttcgagtcctgcatccccagccaaatgatgtattactaagctatatttgaactatttttattttaaatatagttaggttcaattttagaataagtttaagtatccgaatgtggagaggtgtccgagtggtttaaggagctggtcttgaaaaccagtgacttcgaaaggggccgtgggttcgaatcccaccctctccgccaaatgcccagatagctcagtcggtagagcaggggactgaaaatccccgtgtcggtggttcgattccgcctctgggcaccaaaatatggcggtatagcttagttggctagagcgttcggttcatacccgaaaggtcataggttcgactcctattaccgctactaaaatttaatgtgggccattagctcagttggttagagcgcccggctcataaccggtaggtctggggttcgagtccctgatggcccaccacattaaattaattaatataaattcgaggtgtagcgcagtttggtagcgcacatggtttgggaccatggggccgggggttcgagtcccttcacctcgaccaatataaggtgggtatagctcagttggttagagcgccagattgtggctctggaggtcgtgagttcgactctcattatccaccccaattcatatggtctattagctcagtcggtagagcacctgacttttaatcagggtgtcccgcgttcgagtcgcggatagatcaccaaaaaggtggcgacatagccaagtggtaaggcagtggactgcaactccttgatccccagttcgaatctgggtgtcgcctccaaaatattccaaggtagctcaacggtggagcaaccggctgttaaccggtaggctgtgggttcgagccccacccttggagccaaaaaagccgaagtggcggaactggcagacgcacaggacttaaaatcctgcgggacttacctctcgtaccggttcgattccggtcttcggcacttataaaacaatatcgcggagtggagcagttggcagctcgtcgggctcataacccgaaggtcgtaggttcaagtcctgcctccgcaaccattaaaatggctcgttggtcaagaggttaagacaccgccctttcacggcggtaacaggggttcaattcccctacgagtcaccaattaaatatgcgggtgtagctcaatggtagagttctggccttccaagccagctgtgagggttcgatccccttcacccgctccaaaaatgggaccatagctcagctgggagagcacctgccttacaagcagggggtcacaggttcgagccctgttggtcccaccatttgcggcctggtagttcagttggttagaatgccagcctgtcacgctggaggtcgagggttcgagccccttccaggtcgccaaaataaaatgctggtgtggctcaacggtagagcagctgacttgtaatcagcaggttgtaggttcgattcctatcaccagctccatgtaaaattaatacggaggatttcccgagcggccaaagggggcagactgtaaatctgttgtcatcgacttcggtggttcgaatccaccatcctccaccaaaaaaatgcgcggatgtggcggaattggcagacgcactagacttaggatctagcgccattggcgtgggggttcgactcccttcatccgcaccatttttatttaatttaataaacgagcgggaatagttcagtggtagagcgcaaccttgccaaggttgaagtcgcgagttcgaatctcgtttcccgctccaaattttatgtttatgttgtaatgtgggtgcatagctcagctggatagagcaacgcccttctaaggcgtgtgtccggggttcgaatccctgtgcgctcaccacatatatattggggattagccaagtcggtaaggcacatgactttgactcatgtatgcgtaggttcgagtcctgcatccccagccaaacagtatggtctattagctcagtcggtagagcacctgacttttaatcagggtgtcccgcgttcgagtcgcggatagatcaccaatggagaggtgtccgagtggtttaaggagctggtcttgaaaaccagtgacttcgaaaggggccgtgggttcgaatcccaccctctccgccaaatgcccagatagctcagtcggtagagcaggggactgaaaatccccgtgtcggtggttcgattccgcctctgggcaccaaaatgtggcggtatagcttagttggctagagcgttcggttcatacccgaaaggtcataggttcgactcctattaccgctactaaaatttaatgtgggccattagctcagttggttagagcgcccggctcataaccggtaggtctggggttcgagtccctgatggcccaccacattaaattaacttatggtgggtatagctcagttggttagagcgccagattgtggctctggaggtcgtgagttcgactctcattatccaccccaacttatatggtctattagctcagtcggtagagcacctgacttttaatcagggtgtcccgcgttcgagtcgcggatagatcaccaaaaaggcggcgacatagccaagtggtaaggcagtggactgcaactccttgatccccagttcgaatctgggtgtcgcctccaataaaatgcgctcatagctcaactggatagagtgtctgactacgaatcagaaggttaggggttcgagtccctttgggcgcaccatatgaatagcgagggattatagctcagctgggagagcacctgccttacaagcagggggtcacaggttcgagccctgttaatcccaccagtgcaaacctctagtaaaactactagaggttttatttttgattgaaaaagtttttatatttaggaggtaagaaatttgtatatagtaataggaaatgaaatagttgatagtgaagaacttaaaataattatagatgaaaatagtaaatttaaagttgaaaaagatttaagtaaaagcacaaaaagagaagatgtaatagcatatcagttaagtatagatttaaattacctagattctcttataaatgagcaatgtaatttgtccagtttatctgatgaagagaaatttgatgaatatatgactttgtctgatgaacttgcactggatttagaagagttaatgccaaaatatacaataataaatgctagagcatataaattagacgaggtagatggaattgtaaaaataatactagctgtagcgtatgcagatttagggcacttaaaactttctgatgtagtaaagaggctatctagacaagtagattaggatatgaatatgaactatattaaaaaaatgtataaaatcttacgtaaagatgaaaataattatgtaaacatagaaaaaaacagtataaaatcaagtcaattgtagaaattttcacataaattcatctgaaattctataaaaaatgccttaattttaatgaggtaaatcgagtttacacagtctaaaaattacttatatttataaatttatcttattaattaaggaactttcttaaacatcttcaaaaataaagtattttagtctataatctttaatattacacaaacaataaaggagaagaatagagtatgcttaaaaagtttaataaaatactagtggctaatagaggcgaaatagctataagaatatttagagcctgttcagaattggggataaaaagtgttggtatatacagtaaggaagataagtatggattgtttagaacaaaagcagatgaatcatatttgataggagaaggtaaagggccaatagatgcatatttagatatggatggaataatagacctagcaaagagaaaaaaagttgatgctatacatccaggatatggttttctagcggagaatgcagaatttgctcgtaaatgtgaagagaatggaattacttttataggaccatcatctaaggtaatgaatatgatgggggataagattaactctaaaaaaatcgcaaaagaagttaatgttcaaactataccaggagtagaaaaagcaataagaagtactgaagaagcaaaggaagttgcaaacaaaataggatatcctgttatgataaaagcatctaatggcggtggcggtagaggtatgagaattgtacatcgcgaagaagacttagaacttgaatatgaaactgcttgtagtgaatcaagaaaagcttttggagaagatattatatttatagaaaaatatatagctgatccaaaacatatagaagttcaaatattaggtgataattatggaaatatagttcacttatatgaaagagattgttcagttcaaagaagacatcaaaaaataatagaatatgcaccagctttttcgttagatgataaagtaagaaaagagatatgtgaagatgcagttaagttatcaaaacatgtgggttattctaatgcgggaacattagaatttttagtagatgcaaatggtgggcattattttatagagatgaacacaagagtacaggttgaacatactgtaacagagatggttacaggaatagatatagttcaaagtcaaatactaatagcccaaggttacagcttagatagtgaagaaattaatataaaatcacaagatgatgtggaaataagaggttactctatccaatgtagaataactacagaagaccctaagaataaattcatgcctgatacaggtaaaattcaagtttatagaactggttcaggatttggtataagactagatggaggaaatggatttacaggggcaaacataagtcctcattatgatagtttattggttaagacaatatcttgggatagaacattccaaggagcaataaataaaactataagatctataaaagaacttagagttagaggtgttaaaactaatgtaggattcctagttaatgttttaaataatcctatattctcaaatggtaaatgtagtactaagtttatagatgaaaatccagatttatttgaaataacagaaagtaaagacagaggaacaaaattacttcaatttataggagatgtaattgtaaatgataatgcttgtaaagaaaaaccactatttgatgcattacatgacccaagaatggataaggatggttcaaaatcagaaggaagtaaaatacttttcgataagttaggtaaatctgcatatatagaaaagataaaaaatgataagaaattactattaacagatacaacaatgagagatgcacatcaatcattattagcaacaagaataagaacatatgacttattaaaagctgctaagccaacagaaaaatatcaaaaggatttattctcacttgaaatgtggggaggagctacttatgatgttgcatatagatttttaaaagaatctccttggcgtagattacaaaagctaagagaagaaataccaagcataatgttccaaatgttgcttagagcatcaaatggagttggatataaaaactatccagataatgtaatagaagaatttacaaaagaatctgctagacaaggtatagatgtatttagaatatttgattcattaaactgggttgaaaatatgaaaccatctattaatacagctttagaaactggaaaaattgttgaagcaactatgtgttatacaggtgatatactagataagactaaaactaaatacaatctagaatattatattaaaatggcacaagaattagaaagcttgggagcagatataatagcaataaaagatatgtcaggtcttcttaaaccatattcagcttacacactagttaaagagttaaagaaaaatgtaaaagcaccaatacatttacacactcatgatacaagtggaaatggtgtagcaacttgtttaatggcgtcagaagctggagtagacataattgatgctgcattagaatctatggcaggacttacaagtcagccatcgcttaatgctatagtagaggcacttaagaatacagagagagatacaggaatagatttatttggatatgatgagttaggaaaatattataaggatttaagaaaagtttataataaatttgaaagtgatttaactaattcttgtgcagaaatatataattttgaaataccaggaggccaatatacaaacttaaaacctcaagctgatagtttaggattagttaatagatttgatgaagttaaagaaaaatataaagaagctaatgaagttgtaggagatataataaaagtaactccatcttcaaaagttgtaggagacttagctatctttatgactaaaaataaattagataaagacaatataatagaagaaggtaaaaatttatcattcccagattctgttgtggattactgtaaaggtatgattggtcaaccagaaggtggaataccaaaagatttacaagaggtagttctaaaaggtgaagaagctataacagtaagaccaggttcattattaccagcagaagattttgatgaaatagctaaatatctaaatgaaaagtatgatataaatgctaatataagaaatgttataagttatgctttatatccaaaagtatatgaagattatatcaaacatctacaacattataatgatatatctaaacttgaaagtgatgtattcttctatggattaaataaaaatgaagaatgtgaagtagaaatagaagaaggtaaggtattaacaataagattagttgaaattggtgaagttaaggaaaatggatttagaactataggatttgagttaaatggaatggttagagaagtagaaataaaagataagaatttctctggaaaaattaataatgttgaaaaagctgatatgaatgaccctcttcaaattggagcaagcataccaggaaaagttataaaaataatggttaaagaagaagatgaagtaaaagcaaatcaaccattaatcgttatagaggctatgaagatggaaactataatagttgctaagactgatggagtaattaagtcaatcaaagtaaaagaagatgatatggttgaagataaacaattattaatgataatgaagtaatttaattaaaataaattaaaaagcactctgaaatgtttaataaaaaatgttttagagtgtttttatttattttaattaaatatttgttaaaaaaaagaggacaattacctccagatgtagaaataaagctagtaaggaaaatgttatctaaaaattctaaatatagtaaatattttccataatatttcttaggaaataacagcaaagataaaatacataaatttaaaaggtgggtgcttatatgaaggtttatgatagtaaaatgttgagaaatgtagcagtattaggacatagcggatgtggaaaaacaaatctaatcgaaactatagcttacacagcaaacactaataagatacctaaattaacagacaaggtaaatatgacttatagcatgggattaatacctatagagtataatgattataagtttaacttattggataccccaggatattttgactttagcggagacgttgtgtcatctcttagagcaagtgatgcagcaataatagtaatagatgcaacagcgcctattcaagttggtacagagaaatcattagaactaactgagagtattcctaagataatgtttataaataaaatagataatgaaaaggcaagatacaaagatgcaatagcaatgttaagagaaaaatacaataataagatagttcctatgataagtcctatatacaaagataaaaactttgtaaagttacataatgtttttgaaaacatagatgatttagaaggtgaatttaaggaacaagctatgagtgttaaagaagcattaatggaacttatagcagaaactgatgaccaaatattagataaatattttaatggagaagaactaactacggaagagatacaaaaaggtattattataggtatacaaagaggtgatattatacctgtaatatgtggttcaactataaataatataggcacaaaggaaatattagatacaatatcaagttatttagaacctatctttacagaggaaagcaaaccatttaggggattagtatttaaaactatggttgacccatttgttggaaagatgtcatatataaagattactgagggtgtactttctaaggataaagatgtttttaatataaataaaaatgtaaaagaaaaaatagctaatatatatacattgagaaatagtgaattagtagaaatagaaaaagctaaagctggtgatatagtagttataactaaagttaattctctaaaaacaggagacactatatctgcagataaagatgcagaagctttagaaaagatagattttcctaaaccacaaatatattatgcagtaactcctaagaataaaggtgatgaagaaaaagtagcatctgtattaaataaactagtagaagaggaccctacattacattggtatagaaatacagagacaaaacaagcacttttaggaggtcaaggagaacttcatataaaaacaattaaaaataaaatgaaagataagtttggtgttgatgttgaattgaatgaccttaaagttccttatagagaaactataaaaggaacagccgatgtacaaggaaaacataaaaagcaatcaggtggtcatggtcaatatggagacgtaaaaataagatttgaaagatgtgaatctgattttgaatttacagaagaaatatttggtggttctgtaccaaaacaatatataccagcagttgaaaaaggtctaaaagactctatgcaaaaaggtatattagcaggttatcctgttacaaacataaaagctacgctttatgatggttcataccatgatgtagactcttctgaaatggcctttaagatggcagcaagtgcagcctttaaaaaaggtatggaagaagcgcacccaatactactagaacctataatgaaacttaagataactgttccagaagaatatatgggagatgtcatgggtgatataaataagagaagaggaaaaatatttggaatggaaccagatgacaaagggaaacaaataatatttgcagaagctccacaagcagagacatttaaatatgcaatagatttaagagcaatgacacaaggtagaggatactttgaaatggaattagagagatatggagaggttccatcacagtttgcagaaaaaataattgggttagctactgcaaagtaatgaacaaaataaatagaaaaataattaatatatattattaaaaatatttttagggttttaactaggtataggtttatgttaggtaaacttatacctagtttttatacatttttgatgaataaaaaaatatataatactttcttaaatgttttaataaaaagaaagtatttttttattattatttttacaaatgtttagtaataaagatgagaaggtatatttaaaatataaagtatttaaagttctgaaatctaatcatgaagcaaaaaattagcatttggttatcaataaatataataaataaaaactcataattaatgaaagaataaattcatatctaaatttctataaaaaatttaaatttatacaatttagggctttaaaaatttaaataataggtgtaaaataatagtcaaagaaagtcaaaaataaaaaggtgtgtggtgatattaatggcaactatgacagatataattgaaaaatttattaaagatttgatggaagaagataatagcatacaaattcaaagaaatgaactagcaaacttgtttagttgtgcaccatcacaaataaattatgtcttaacaacaagatttacaatagatagaggatattacattgaaagtaaaaaaggtggcggaggatatgttcaaatagaaaaaatacgaaaaagtaaagatggacatattagagaactactaaatgaaaaaataggaagtcagatatcctataaaaaagcaaaggaattattagaaggtttaaaagagtcggatttgattaacgaaagagaattaaaattaatattatatgcaatagatgataaatcattgtgtatgccaatatatgaattaaaagagaaggtaaggtctaatattttaaagaatataataataggattatttagtatagaggagtgataatttatgctatgtcaaaaatgcaataagaataaagcatctgtatattataataagatagtcaatggagaaaaaacagagatgtatttatgtagtgagtgtgcaaaagagaatacagaaatgaattttaacttagatatgcctttttcaatgatggatatattttctaatttaggttttcaacctaaaaaagaacttgaggaaaagctagtttgtcctaaatgcaatacaacatatagtgagtttaagaataatgggagatttggatgtagtgaatgttataatgcatttagtagtcaagtaaatccaatgcttcaaaatatacatgggcatatagaacatacaggaaaagcacctaaaaaatctttttataagataagtgtagaaaatgagattaaagaactaaaagaagatttagatagagctataaaaaatgaagagtatgaattagcagctcaatttagagataaaattaaatatttaaaaggttctattgactaagattggagtgatattatgaaagagaacatagtcatgaaatcaagagttaggctagctagaaatttaaataactatccatttccaaataaattagataaagaatgtgccatggaaataatagaaaaagtaaaaaatgcgtttattaattctaacttagaacaaaaagaagaatttgatttctataaaattgaagatttagaccaatctaaaaaaatgcttatggttgaagaacatataataagcccagatttagcagaaaatgataaaagtgcagttatagtaaaaaaagataaaactataagcataatgataaatgaagaagaccatataaggatacaaactatatgtgatgatttaaacttagaatatgcatatagtgtagcaaatgaaatagatgatttgttagaatcaagtttagaatatgcctttaacacaaagctaggttatctaacatcttgtccaactaatacaggaacaggaatgagagcttctgtaatgatgcatttaccagcattaagtcaactaggctatatggatgaactttataaaatttcatcacaaataggtatagcaattagagggatatatggagaacgaacagaagcattgggaaatatatatcaaatatctaatcaacttacacttggaagaacagagtctaatattatagaaaatgtaagtggacttacaaaagatgcaatttcaaaagaaataaaagctagagaaatattgcaaaaaaaattaggtataaaactagaagataaaatatttagatcgatagggacacttgaaaattcaagagtaatgagtagcgcagaggcaatgagccatctatcaaatataaaaatgggaatagaaatgaactatatagataaactagatttaagggctatagaacaacttatgataggtatacaaccagcgcatcagtcaataatgtataagagtgatgatgttgagaatagagatataaatagagcaacatatattagagaaactttggaaaaattaagaggagggatgaattgtgaacttcaatagatttacacaaagagctaaaaaggcaattgatttagcgtttgaatctgctaaaagtctaggacacaatattgttggaagtgaacatatacttttaggtcttttaagagaagaagaaggtatagctgctaaagttctaagtaaagttggatttacagaagcttatttagaaggcaaaatagttgatatggaaggtaagggagaagaaatctcagaagatatagtattaagtccaaggagtaaacaaatacttgaattatcaggaatgtttgcaaataaattaaaaacaaattatattgggactgagcatatattattagcaattattcaagaaggtgaaggaatagctaataagattttaaattatgctggagtaaatgataggactttagcccaattaacaattgatatgatgggtattagtgataaaaatcaatacaaagcagagaatagttacacgggcaaccagaatcaagcagaatctaaagtacttgataagtatggaagaaatcttacactatatgcaaaacagaataaaatagaccctgtaataggtagagaaaaagaaatacaaagagtaatacaaatattaagtagaagaactaaaaacaatccagtgttgataggagacccaggtgtagggaaaacagccatagctgaaggtctggctacaaatatagccttaggaaatgttccagaaacactaaaaaacaaaactttatactctttagagatgggttcattattggctggggctaagtatagaggagaatttgaagaaagaattaaagaagttgtagatgaagttgttaaaaatggaaacataatcttatttatagatgagatgcacacaataataggggctgggtctactggagaaggctctatagatgcttcaaatatattaaagccagccttggcaagaggagaaatacaagttataggtgcaactacaattgatgaatatagaaagcatgttgaaaaagattctgctctagaaagaagattccaaccagttatggtagatgaaccaactaaagaggactcaataaaaatattagaaggattaagagataaatatgaagctcatcataaagttaaaataactgatgatgctataaaggcagctgtagaattatcaactagatatatatcagacagatatctgccagataaagctatagacttgattgatgaagctgcatcaaaagtaagattaaaagaaaatacacctccttcagaaataaaaaaattagaactagaaatagaaaatatagataaagaaaaagaagaagcagtaagatgtcaagactttgagaaagcagccaaaataagagatgaacaaggtctacttaaaaaacaattagaagatgttagagaaagatggaacaagtcatctaaacattcagatttagttgatggagaagttattgctgaagtagtgggcttatggacaggaataccagttaataaaattcttgaagaagaggctgatagacttttgagacttgaggaaatactgcacaatagagttataggtcaagaacaagcagtaaaatctatttcaaaggcaatcagaaggtcaagagcaggtcttaaagaccctaatagaccaattggttcatttttatttttaggtccaacaggagtaggtaaaacagaattatctaaggcattagcagaagtgcaatttggagatgaaaatcaaataattagaatagatatgtctgaatatatggaaaaacatgctgtgtcaagaatgataggttcacctccaggttatgtaggtcatgatgaaggtggtcaattaactgaaaaagtaagaagaaatccatattcagttatcttatttgatgagatagaaaaagctcatccagatgtatttaatattctgttacaaattctagatgatggtagactaactgattcaaaaggaagaactgtagattttaagaatactattgtaataatgacatcaaatgttggagcatctacaattggtagacaaaaaactttaggatttagtatagctaaaggagacgaagaagaaaaatctcaatatgaaaaaatgaaagaaaatataatgggtgaattaaaacaaagattcagaccagagtttttaaacagaatagatgatataattgttttccactcactaaatgaaaatcatatatcaaaaatagtacttttaatggcagcgaaactacaagagagattaaaagaaatggatataaaattagaaatgagtgatgaggctgttaaattaatttctaaatctggatttgacttagaatatggagcaagacctcttaaaagagctttacaaaaagagttggaagatgagctatctgaagcaatcttaaaaggtaatgtgaaaaagggaagtaatgtagtagcaaaagtcaaagatgaaaaaatagtttttgaaactaaataatttaatagagttgcattttaaaatattgcaaatataagttttataatctaaacaaaattttaagggcaatgaatctataataattcattgtccttaattattttatttaatctttacatattgtctttcagatatgctaaaattatagtatagaataaaaaattaaggatgataaaagtatggcaaaaataaaaacaaaatatgtatgtcaatcttgtggatatgaaacagctaaatggcttggtaaatgtccagaatgtacaaaatggaatacatttgtagaagaaatagaccaaaaaagcaccaaaaaagaggtctttataatagataaatcttcatctaaaccagtcagtataaactcaatagaaagtaaagaagaagagaggtttacaacagatataaatgaattagatagagtgcttggaggaggtatagttaaaggctctttagtgcttgttggtggtgaccctggtataggtaaatcaacacttttaatccaagtatctagtaatgttgccaatttaggaaaaactgttttatatataactggagaagaatcagaatctcaaataaaaatgagagctaaaagattaggtattaactcagaaaatttatatatatttgctgaaaataatttaagtataattgaatcttatttagaaagtgtaaatccagaattaataattctagactcaattcaaactgtcttcagtccagaaatatcctcggcaccaggaactgtcagccaaattaaagaaggtacttcaaaattcatgaaaatttctaaaaaaatgggaatttcaacgttcatagttgggcatgttacaaaagaaggttcactagcaggaccaaaattattagagcatatggttgatactgttctatattttgaaggagaaagatataatacttatagattagtaagagctgttaaaaatcgatttggttcaactaatgaacttggagtatttgaaatgagggatttaggattagtagaacttgataatccatctaaaattttaatctctgaaaaaccaaaagatgtagcaggttcagtaataatatctactgtagaaggtacgagaccaatgttacttgaattgcaagcattagtttctcctacaagttttggtataccaaaaagaacatctacaggagtcgattacaatagagtaggtatgttattagcagtattagaaaaacgtgttggtttgcaaatacaaaatcaagatgtctatataaacatagttggaggaataaagataaatgaaccctcaattgatttagggatagccatttctgtagcatctagttttagaaatataccgatagatgaaaatatagctgttacaggagaagtgggacttacaggagaagttagagcagtaagctttatagaaaagagaatagctgagtgtaaaaaacttggatttaaaaagatagtagttcctagaagtaattatgatgttgtaaaagagaccaaaggcatagaaatatggccagtagataacttaagacaagctataaatatagtacttgggaggaatcaataaatatggagaattttctagataataaaaatatgctatatgcattaaaaatgatatctcctggaactccacttagattaggtctaaacaatgtactaagagctaagactggtggattaattgtaattgcaacaaacgaagatgtaatgaaaatagtagatggaggatttgctataaatgcagaatattcaccatcatatctatatgaattagctaaaatggatggagctatagttttaagtggtgatgtaaagaaaatattatttgctaatgcacaacttatacctgactattttatagaaacatcagagacaggaacaagacatagaacagcagaaagagtagcaaaacaaactggtgctatagtcataggaatttcacaaagaagaaatgttataacagtttatagaggaaatgagaagtatgtagtcgaagatatatctaagatatttactaaggcaaatcaggctatacaaactctggaaaaatataagacagtattggaccaagctgtaacaaatttaaatgccttagagtttaatgatttggtaactatttatgatgttgcattagtcatgcaaaagatggaaatggtaatgagagttacaagtataattgaaaaatatgtgatagaattgggtgatgaaggaactttagtaagtatgcaattagaagaattaatgggtacaaccagaatagaccagaaattaatattcaaagattataataaagaaaacacagaaataaaagaacttatgaaaaaggtcaaaaatttaaattcagaagaactaatagaattggtcaatatggcaaaactattagggtatagtggtttttcagaaagtatggatatgcctataaaaacaagaggttataggattcttagcaaaatacatagactaccaacagcaataatagaaaacttagtaaattattttgaaaactttcaacaaattttagatgcatctattgaagaattagatgaggttgaaggaataggtgaaataagagcaacatatataaaaaatggactcataaaaatgaaacaattagtcttattagatagacacatatgatgaattttaaatgaattttactacttttttcttgaatataatatacactttggtctataatagataagtataactagggggtgaagcattgataaggaaagtaacaagaatattgtttattttacttggatttacaataggtataacaacctatttaacattaatgaaagattttgaaatattaacatttggaaaagaaacatatggttatatcgcagctgtagtagcaggtataataatagccattttaggatatcttatagaaccatgggttgtaaataaagtaaaagaaattgctaaaatagtggataaagaattgtcaaaatatcctcagactgatatattgttagggtctatgggtcttatagtaggatttgttattgcgtatttattaagtggattagtaaatagaataccaatagtaggtggaatactatccttactattatatttattcctaggatatcttggaatgaaagttgcgcttaaaagtaaaaatgatttatttaatattggaaaactaggaagattagcaaatcctattaaggataaagataaggataaagaaaataaaaaagaagtaaaagccattcctccaaaagtattagatacaagtgtaataattgatggaagaatagctgatatttgtaagactgggtttatagaaggaaaacttattattcctgcttttgttttggaggaactaagacatattgcagattcttcagatgatttaaaaagagtaagaggtagaagaggtctggatatattaaatataattcagaaagaattaaatatagaagttgaaataagtgagagagactttgatgatatagcagaagttgatagtaaattattaaagcttgctcaggttttaaatggaaaagttgttacaaatgattataacttaaataaagttgctcaattccaaggtgttgaagtattaaatataaatgagttagctaatgctataaaaccagttgctataccaggtgaagatatggttgttcaagtggttaaagaaggaaaagaggctcaacaaggtgttgcatatctagatgatggaactatgatagttgttgatggaggaagaaaatatatgaatgagactataaaagtactcgttacttctgttcttcaaactcctgcaggtagaatgatatttgcaaaacctaaaaattaatatgttcaaagaaacctataatttgggctgtttattttaaatagatggtccaaatttatttatttataacgataatgtttaatgtattcttaaagatggggatttaaatcagaaagcagggagaatttatgagaaaaaagattatatctttcttagcaacatttatcataatattaacatcagcaagtcagtatagttttgcagatgatatgtcaacacgtggaaaagtaatatttatagatatgaatagaactagtatgagtaatatgttaagaataaaatcattaagagaagaactagacaatagagggtatattggcttgatgaatataagaggcgataaaggaagtgatgatagaaggtcatatgctagtatgggtgctggtggtagagctaatgtggctaatgaagaagatattaattttgaaagctcgagtaaggatagaaatatagtttttgaatcagctacaggaaaaagtgcaaaaggtataaataatttaactataaataagtctataaatgaaaatttaaactttggagagtatggttctgtattagggtcattaggacaaagtttatctgagaatggattaaaagcatctgtattgggtaattcagatataattgaaaatggtcaacttataaaaaatagaaacttatgtctaactgcaatggatgaatatggaagaatacctaatggaaatgtagatactataaataaaaaagacttatctatgccttatggaatatcaactgattatgataaattgattgtagagaccaaagaagcttacaaaaataatgatgtggtttttgtggagcttggagacacatatagattagatttatataaaccaaatttaaatgaaaaaacatatgagagtgtgaaagataacatagaaaaaaatatagatgtatatttaaaaaatatattttctatggttgaagaaaatgacactgtctacatagcaagtgcatttccaagtgatttagattataaaaataaaagaagactttctccaataataaaattaaatggagaagggaaaggtatattatcatcttcaactactagaagagaaggtattgtaacaaatttagatgttggggttgaaatattagacaactttaatataaaaaatcaaaatatggttggaagaaaatatgaacttattaacagagatgataataaagaatttttgatggatgaatatcaaaagatagtatctatttcaagcataaggtctacaatactgaatggttttgtaagtatagttttcttgtcatggatagttgctatgattgcaattttatttagaaagcatatatcaaaaaattataaagaaacaacattttttatattaaaggaacttttaaaaataggaatagtaatgccactgtcatttatgataacaccaataatgaatttcaaaacaccattagcaatatctttaggaataattataataacacttactatatatcttataagtaaagttttaataaagaatgatttaaaaaacatgctgttttttactggattaaccatagtaattatggttattgatgctgggtttggctcatatttaatgaaaagcaatgttatgagttatgactgtataattggagctagatattatggagtgggaaatgagtatcaaggtgtggcaatcggtagtgcaatatttacatttgcaattttacttacatataaaaatataccaaagtggtctataatagttttttctttggttatcttaattacaagtgcatctccaattatgggagcaaatgttggaagtgctatttctgaatgtgttgcatttttactatttatactattgatatataatgtgaagatagacttcaaaaaaattgtattattaggtatagcagtattatttgtattaggagtttttgtagcaatagatatgattttgggaagtaattcacatttaggtatgtttgtaaaagaaatttactttaatggaccaggagaaataatacaaacatttagtagaaagatagagatgaatttaaagctagctcaaaccagtgcatgggtaaatatactgttaactggaataggtgtaattttagttcttatgattaatcagattagatactttaagcaactgatggatgagtatccaattgtatttaaaggatttatagcatcaatagcaggatgtttagtaactcttttagtgaatgactctgggattgtgtcatcagctacagcctttatttatgtaattgtacctatgataacattaagtataaatctcacagcattaaaagaataagtactgtatgaataatatgtaaatatgaacacattaatttaacttctttatttacaaaataaagaagaaagtttataaaaaataaattataataaaaaagagtttacctcaaaattgattattctaatcaaattttaaggtaaactttttttattataaagataaataacatataacctcatattttaggtagatttttttcttatatgtttaggagtgcatttaaatttttccttaaaaattctgtaaaataattttgtattagtaaatccatgagcttctaatatactgcataaggtatcatttgtgttaattaagtctttataaatatgagaaatacgcacatcatttaaatactctaagtaagtttgtcccatatactgtttaaattttctacaaaaatattctggctgtaagtgtgctaccttagcgattttgttaatagaaataggcattttgtaattaatctttgtatattctaaaactggttcaaattttgacaaatcaagtactgtttttttcatatttttattacctacagatattttaaagtttgtatataattcaaataaaagttcaaataataagcttgtaaagagcagattagctgcaggaggagagctaagtttaatttctctcatgttttctaatataagtttaactttacctgaattttttttatagttattgtcattggcattaaccttaaagtcaaaatagcaatttttaaaatcagggatatatttgtttagaaaagacaatggtacttgcaataatatagaggtatcttgataagtacatctagttgagtgaataattccagaattaatgaacatacactcattagcttttaaattataagtgtaaccctccatgttaatttgtaaatcaccagaagttatataaattatttctaatgagttatgccaatgatttgctacataactaccactatcatcaaatagtttgaaattaacatctaaattatcaataggttcaattatttcatgtgaaaaattatttctgttcataataatatcctccttataattttaaattataaatagtaaatttataatgttcaatattaaaaagataatatagactaataaattagataataaacatacttaagaaaacggataaaatcaaatataataactgtatattaaaataacttaaaaaaattattttattataagtgcaaaatatacctatttaaataagataagaggggaggattttatgtgtatataaaaggtgtaaatttaggaggttggttagttttagaaaaatggatgacctcaagtttatttgaaggcacagaagctgaagatgaatactatttaccaagacagctttcaagagaggcatatgaatctagaattaagactcatcgtagtgaatacatcacagagagagattttgcaacgattaaatctatgggatttaattcagttcgtataccagtaccatactttatttttggagattgtgaaccattcataggatgtgttaaagaacttgataaagcatttgcttgggcagataagtatgggcttagtatattgatagacttacatacagttccaggaagccaaaatggatttgataatggaggaatatcaggtatatgtagctggtcacaaaatccagaatatgtagcgtttacattaaatgtattagaaagacttgcaaaacgttatgggatgagacatgaattgtatggaatccaaattttaaatgagcctataacagaaagaatgtggaacataatgaatgttccaaatcggtttaaggctgtagataaggagatggcaagggggagtaaacctaattcattagagtttttacgtgatttttatataaaagcatataaggtaatgcgtccttatatgagagaggaaaacgttatagtgtttcatgatgcatttgaattaaaagcatggaaagactttatgagagaggaagaatttaaaaatattgttctagatacacaccaatatttgatgttagctgaatcagatggatgtgaacaaagtattgatagctatctcaaatatattagagaaaattatgctaaagatattttacaaatgcaaaaatattttcctgttatatgtggggagtggagcttatttaattcatatgcttgtggtatagatacaaatggaggtcaatcacctctaaatgggattgaatcaaatatagataaattatcaaaagacgataaaagagaattatataggaagatagcaaaagcacagcttgatgcatggagaaatggaagtggtcactactattggaattataagttattactagatacagttaatgaagaaggttggataggatgggatagttgggacctaggcaaatgtgtagctcaagaatggtatcctatagaatattaaactaaaattggaggaaaagatatgattaaaaaccctatacttccaggttttaatccagatccttgtatttgtagaaagggagatgattattatcttgtagtttcatcttttgaatggtttccaggtatacctgtttatcactctaaagacttaaaaaattgggagttatatactcatattttgacagatgaaacaaaaatagatttgaagaagcttccttcatctaaaggaatttgggcaccttgtttgacttattgtgaagaagaagatttattttacatagtttatggaattatgaactctatgaatgcaagatattttgatgttgataattatttaattacatcaaaagatataaagggagagtggagtgaaccagtatatatacactcatcaggttttgatgcgtctattcttcatgatgatgatggtaaaaagtggattgcatcattagactgggagactagagaaggatatgaaaaacctggtgttatatgtttagtggaatactgtacaaaaaagaaagaaatagtaggatatccaaagagaatatggtcagggggaactgatagaggttgtattgaagcaccacatataacaaagcgtggagattactattatataatgtgtgcagaaggtggaactggatatggtcatagtgtaactatgggaagggctaaaaatatatggagaccttatgaaaaagattcaatgaatccaattgtaacttcaattccaggcgatttttatgaaagacatgaccctgaccatctaaagcctaaatactataatccagaatcaaaacttcaaaaatctggtcatggaagctatatagaaacaacatcaggtgaagtatatttagttcatctaacatctagaccatttgtaccagagttaaggtgtactttaggtagagaaacagctattcaaaaaatgaaatggacaaaggataattggcttcgaatggaagatgaaagtaatttggcaaaagaatacgtatcagaaagtaaactagaagaacatttagtttcatctataccaagttttgatgactttgattcaaatgtattaggtttacagtactatgctcctaggatttcaccattatcatttgcagatgttaagtctagaccaggatatgtaaggattagaggtcaagaatcaagaacatcattaaataaagtaagcatattggcaagaaaattaacttcagtatatgcaagaataaccactaagatggagttttacccagaggtacatcagcatagtgcgggtttgataatgtattatgataatatgaattatataaatttaagaaagtattatagtgaaacattgggtcaaagtgcactatcaataatacatcttgaaaatggagagaagacggaatttttaaatactaggataccaataaaagatataccaatatatcttcgtctgtatatacaaggtcgtaagtcatattttgaatggagttatgatgaaaaaaactaccaaagaataggaaaggtatttgatacaactaagttttcagatgagtactgtaaatatggagaatttacaggtacgtttataggattaacttgtgcagatcgtgtaaagcataaacactatgctgattttgatttttttgaatatatagcagatgaatcaaaagatgtcgattaataaaatcattactaaaattttcagagcaaaggtaaatcttatgctctgaaataagaaacattagaaggcaaatcttacaaaaaggagtatggtattatgaatacagaagttaatgttaaagcaactacgattagatatgaaaagatttcattttttgaaagaatttcttatggttgtggggatttggggtgcaatatcatatactcagctatgtcagcatttttgctgttttattatactaattatgcagatgttagtgcagcagctgtaggtagtattatgcttgtatctaggatactggatgggtttagtgacttaacaatgggaattatagtggatagaactaaatccaaatacggtaaggctaggccttggattttgagaatggcgattccttttgctatagcagcagtattattattttctgttccatcaaatcttggtatcacttctaaattaatttatatttttattacatataacttagtttctactgttatttatacagcaatcaatgtaccctatgcaactctaaattcacttataactcaaaaccagtatgaaagaggagtattaagtatatttagaatgatattagccacttgtggtaccttactaataaatggacttacactacctctagttgaatactttggaaataatttatcagcatggactaaaacattctttgtatttggaatagcatctataatggtattttttataacatttactggaaccaaggaaagagtaaaagcagttaagcaagataggaatgaagtaataccatttaaaataggtattaaatctttatttagaaataagtactggatacaaataacattatgtttagtttgcatatttattgtatttgcgataaatggtggttcatccgtatattatgcaaagtttattttgggagatgaaaaattatttggtcctataaatatggtttcaaatatatcccaaattatagctatgtttatggttgctccttttataaaaaaatttggaaaaagaaatgtattaatagtaggttcaataatattaatatcgtcaaatgttatgtttataatagttggacaaaactatataggagtaatatttgcaagtgctataaagggaataggaagtgctggaatagcatcaacaatgtttgctattgtttcagatactattgaatatggagaatggaagactggatatagaactgaggggcttataaatagtgcatctagttttgggtttaaagtgggaaatggattaggttcagcaatattaggtgcagtattatcaattggtggttatgtaggaacatcagctactcaaagtgatttagctatagtatcaataaaagtatgttttatatacctacctatatttataacaatattacaaattatcataatgtttttttataagcttgataaagaatatagtactatacttaatgaattaaatactaaataatgaaaaagtttcttataaagtcttaagtttaattaaggtctattgtaaatgttccctataaaaactattatatatttatgattattgaagaatttttagagaagcgaataataaaaatataagaagactttaaatgatgaaatggttggtcttttagaaatgatttaataagttatttttatttaaagcattataagtggacaattaatttttaatttatggagatgatatttaacaattagaagtaatatataatatgcgctaagaagcaatttttcaactatttatgaaggtggtggtacaagaaaagtatcaccttttttttgttatacaaaaaaacagttgactttttatatgaaccccttctataatgttactgaaattaagtaaaatgattgaacaaatgtaaagataattgaaaagcttgattttggaggaaatcaaatgaaaaaaattggagacttaagattaatgatgaagtgttgttcactttattacgaagataatttgaatcaacaggaaatagcaaatcaattgggaatatcaagaccaacaatatcaagaatattaaaagaagcttttgaacaaggaatagtaaaaatacagatagttgatgttttgaaaaatgattaccaaaaaatagagagaagtttggagagaaaatataaattaaaagaagtaatagtagtagatgataaacaagatgcactaacacaaaaacaagaactagcaagagctgtatctgaatatttaactagagtagtaaaggaaaatgatataataggtgtttcaataggaacaacactaaaagaaataccaagatatgtggaaaaaagtaactgtaaaaatgttacatttatacctctattaggagggattggagacaatgaaatagatattcatgcaaatcaaatagcagtaagtctagcgagggcttttggaggtgattttaaattattacatgctccagctgttatgtctgacttgtctacaaaagagaaactttgcaaagacgaaaaaattaaagaagtactagatttaatagataaaacaactatagcaattgtgggtataggaaatcctatgagtttaaactcaacaataatggcttctggatacatgaatgaagcagatatagaagatttaaaaaaatacaactcaataggtgcaatttgtttacaagcctttgataaagaaggaaaaacttctatacttgaatttaatcaaagagtattaggagtgaaactggaagatttaaaaaagataaaaagaacaataggtgtcgcttcaggagatgaaaaaatagaggcaataaaggcatcattaaaagcgaaatttataaatagtttagcaattaatcacagtttagcacttaaattattagaagattgtgactaatagaaagatagataaaagttaacaggagggaatgtatatgtcaatatcaaaagaaacattgcttgaaatgtataagagaatgaatcaggctagaaaatttgaagagaaagttagttggttttttgcaagaggtatggttcatggaacaactcacttatctgtaggtcaagaagcgtcaagtgtggcggctgtaatggctttagaaaaaggagatttagtatcattaactcatagaggacatagtcaatttataggaatgggaatagacctaaataaaatgatggctgaacttatgggtaaagaaactggattttgtaagggaaaaggaggctcaatgcatatagcagatattgagtcaggtaacttaggagcaaatggagttgtaggtggaggtcttacaatagctccaggagctgcacttacacaacagtataaaaaaacaggcaaaatagttttatgtagttttggtgatggagcatcaaatgaaggtacttttcatgaaggaataaatttatcttcaatatggaaattgccaataatattttactgtgagaataatttatacggtatgtcaacaagcataaaacgtcatatgaatatagaaagtattgccactagagcagcttcttatggaatagaaggaatatcaatagatggatataacccaatagaagtatacgaaacagtacaaaaagctgctgagaagtgtagaagaggagaaggacctgtattaattgaaagtagaacttatagatggttaggtcattcaaaatcagatgcaaatgtatatagaacaaaagaagaaatagaatcatggaaagcaaaagaccctattgaatttttaaaaaattatcttatagaaaataatctatctaatgaagatgaattagataagattcaagaatttgcaaagcaatcaatagaagatgcagtagagtttgctcaaaatagcccaaatccaaaaatagagtctttattagaggatgtatatgcagactaagaatggtaaaggaggaaaataaaaatgagtacaagggaattaacatatgcacaagcaataaaggaagcaatgtcagaagaaatgagaagagatgaaaatgtaatatttatgggagaagatataggaatatatggaggggcatttggtgtatcagttggtatgatagatgaatttggaccagaaagagtaagggatactcctatatcagaagcagctatagcaggagcggcagcaggtgcagcagcaactggtttaagacctattatggaagtaatgtttatggactttgtaacaatttctatggatgcaattgtaaatcaagcggcaaaaatgagatatatgtttggaggaaaagcacaagttccaatggttgttagatgtccaggtggttctggaactggttcagcagagcaacattcacaaagtttagaagcttggttttgtcatgtaccaggagtaaaagtagttgcaccttctacaccagcagatgctaagggattgttgaaagcagctataagagataataatccagtcatatttgttgagaataaattgttatacagaaaaaaaggttttgtgccagaagatgattatgtaattgaaattggaaaggcagatattaaaagagagggtactgatgttacagtaattacttatggaagaatgttacaaagtgttgaagaagcagcagagactctatcaaaagaaaatataaatgttgaaattatagatttaagaactttatatccattagataaagagactatagtaaagagtgtatgtaaaactgggagagttttaatttgccatgaagcagctaagactggtgggctaggtggagaaatatcagccctgataacagaaagtgaatcatttgattatttagatgctccagtaaaaagaatttgtggaaaagatgtgccaataccatataatccagagttagaaaaagcagttgtcccaagagttgatgaaatagaagaagcaataaaatctttaattgttagataaggagggatagatatggtggcaaataaaataaaagccacaccagcagctagaagtcaggcaagaaaagacaatataaaattagataggctgattggaagtggagaaaatggaaggattcatttagtagatgtgttaaattatttaaaagataataaagcaaatactactcctttagctagaagaatagcagaagatttaaatatagatttagaaactattgtaggtactggatatagtggaaagataagaaagtgtgatgtggaaaaattaactgcaaaagaaactattgtatcaaataatacatctaaatatagtgagaaaaaagagctgaaaattgaaaatgaaaattcaagcatgtttaacacagtagaaggaatatttgaaaagccaaatccaatgagagctactgtagcaaaacgaatgtcagaaagttattttagtgctcctgtatttacattcaatatagaagtagatgctacagaattgaaggtacttagagcaaagttaatcgacacagtaaaagaatcaactggagtaaaattaactatgacagatttaatagtaatggcagtatctaaaatacttccaaatcatcaagccttaaattcagcatggacagatgagggtatatttagatataaagatgtaaatatagctattgcagttggtttagatgaaggcttatatgttccggtagtaaaaaatgcaaacaaaaagtctttaaaagaaatagcaaaagaaagcaaagaacttgcggaaaaagtaaagacagggaaacttatgccagcagaccaagaaggtaatacatttacaataagtaatgttggaatgtatggtataactacatttacacctataataaatatgccttcaagtgcaatcttaggggtaggtgctacacaagataagtttgttccagtaaatggagaggctaaaataaaacctataatgaacttatcattaacatcagaccatagagtaatagatggaacagtagctgcaaaattcttaaaagatttaaaagaattgttagaaaatcctttatcaatgcttgtataggttttgatatttcgttactgatataaatagtttgaatagattatattattataattgtttcagtaaatttaaagcttttatatattaagaattatttttaacagtaactatatgtgaatatgatttgcttaattaaaatatatgaaaataaataggaggagagcctatgtcagtagaagtaataatgccaaaagcaggagtagccatggaagaaggtactatagtatcttggctaaagcaagaaggcgaagaagtaaagattggagaacctatactagaaataacaacagataaagttaatatggagatagagtcagaaggagaaggtacacttgctgtaatcatacataaagaggaaggtgaagtattaccagtatttacagtaataggtgtaatagcagaaaaaggggaaaatcaagaggaagtaaaagctaaatatttatctggaaatgtttcaaaagaagatatagttgaagagaatcaaaatatagaagttaaagaagaaaaaataaacaaaaaagagtgtaatcatgattatgatgtagtggtaataggaggaggacctgggggatatttatcagcattaaaagcagctcttttaggtggaagagttgctttagttgaagaaaatatactaggaggtacttgcttaaatagaggttgtatccctacaaagacttatataaaaacagcagaaatattagaagaaattgaccaattatcaaagagaggtgtaaaagtaactgtagataaagaacaggacattaagaaggccataaaatataaaaatagagtagttaaaaaacttacagctggtgttggcggattattaaaaagtagagatgtagatgtgtttaatcttaaagctagtgttaaagaagagcataaagtaattttatcagatggaaaagttttagatacagaaaatataataattgctacaggttccaaagtaaggatattacctataaaaggaatagaatcaaatttaataataactagtacagaagcattagatttggaaacagtgccagaagaattagtaataattggtggtggagtgattggttgtgaatttgcagagatattcaattcaagaggttctaaagtaactatagtagaaatggaagatagagtaatcccaagaatggataaagagttaagcgaatctttaaaatattctcttagtaaaaaaggtataaatgtattaactaaaaagaaagtttctgaatttaaagaagaaggaaataacatattagtgtgcattgaaggtgaagtgccaataaaagcagatttatgtctatatgctataggaagagaagctaatctttctggcatagaggacttagatattaaaatagataaaggttcaatagttgtaaatagtaaaatggaaacaagtataccaagcatatatgcagtaggtgatgttactggaggtgtaatgttagctcatgctgcttttaaaatgggagaggtagcagcttcaaatgctctaggtgtgaataaagaagttgacttaggtgcattacctagttgtgtttatacaattccagaagtagcatcagttggtattacagaagaggatgctagaaaaaaatataatgtaaaagttggtaagtttaattttgctggaaatggaagagctttagcttctggtcaagaacaaggatatgtgaaagtagtagcagatgctaaatatggagaaattttaggtatacatatgtttggatgtggtgtagcagaacttataaatcatgcagcatcatttaaagcattagagatacctactgatgaagcaagtgagttgatatttggtcatccatgtacttcagaagctttaatggaagctttggcagatgtaaatggagaatgtttacacttacctaaaaaataaatctaaacataaattattaatttaagtctattattaatattaatttatatcataaaattttaaaacacttacttagccataccccttattatgcaaataatttatttgtataataaggggtattttttatggaaaaatatagaatatagaatccttgtagtttttgttgtacaaaaaagatagtaatataaaataacattatcattttagaatgatttcaattgtaattaggaaaagtgatttttttgtttttaaaaaaagtattatttgtaaaatataaaaaaaaatttcttaatatttgaataaaagaatagcttaatttaaatgttattactttataaaaaaataataagtacaaaaaaaacaatatatggcatataagttgctatataaataataaggagggaacaattataaatgaggcaaagaataaaaaacttaattgaaaatgaagataagaaaaatcctttaacagatgaagcgatttcaagtaggttaaatattcgaagagaagatgttacctttttgagaaatgagttaaaaatagaagattcaagacaaagaagaaaagttgttttaattaaagctataaaagatattttaaaagaagaaaaaactataaataaaaatgatataacaagaagattaaacagcattgggtttacagtatcaagatttacagtcatacaatacttaaaagagattcaagattctggtgacctaaaacttgataaagagagtgatgataaaaaagaagaaataatcaataatagagaaaataaagatatagcatttgataaactcataggtagtagtggtagcttaagtacaattataaaactagccaaagcagcaattctttatccacctcatggtcttcatactattattatggggccaactggtgttggaaagagtgagttagcagagtgtatgtataaatttgcagtagaatcatccagattccctaagaatgcaccatttatagtttttaatgcagcagattattcagagaatccacagcttttgctatcacagttatttggacacgttaaaggtgcttttacaggagctgatgagaacaaagaaggattagtatcaaaggcagatggaggaatattgtttatagatgaaatacatagattacctcatgaaggtcaagaaatactatttcaactgattgataaaggtatggtcagaaagttaggagaaacaagactaacacataaaatagatgtaatgattatttcagcaacttctgagccaatagattctcatttacttaatacatttaaaagacgtatacctgtaacaattgaaataccagaattagttgcaagaccattaaatgagaggtttgacattataaataatttcttcttaatagaagctcaaagaatgggagcaaacatacatataaagtcagatgtattaaaagctcttatgctttacgattgtataggtaatgtaggtcaacttagaagtgatattcaagtagcttgtgctaggggactattaaaccaacttacaaacaaactaaaagaagtaaatataagcatatcagatgtacctggatatgtaaaacaaggtcttataaaaatcagaaattgtagaggtaaaatagaaaattatgtagatggggatttaattatagattcaaatcttcaaggtgagatagaaaagaaaaatgaagatatatatacttttccagatgaaatatacaaacttactgaaagaagacatattgatttattggaacaaggtttagattttgatgttataaatagaatcattggaggagaattagaaagttgcattcaaaaatacataaaacaagttaaaaaagtttctattagtaacaatcttccagatataagtccaattgttggaaaatatatcgtagagctaacttatgaagtaatcaaaatagcatcacaatacctaagttcactagaaccgaatctacatttatgtttagcagttcacctaaaagcagcttttgagagattaaaagaaggaaaagtaatatcaaatgctcatttgaaagaaataataggaaattatccactagaatattctgtagcagaaaaggtagctcaatatttaaaggaaagatataatataaacttaccaaaagaagaaataggtataatagcaatatattttaaaatgagtagtagaagagatatgtctgaacaaaaaaagataggtgtacttcttatggctcacggaagagtagcatcttctgtatgtgaggttacaaataaactattaggaattaatcacgcaaggtatttagatatgccatttgagaagaagccggaagaaatgattgaagaagctactacaataataaaagatattgatgaaggtagaggtgtgattatattagtagatatgggttcactttcatattttggagatattatttctggaaagactggaattaatataaggacaatatctagatttgatacattgctttctatagaggttatacgaagagcagttttaccagatttaacaatagacgagatagttgatgaagttaaaggtatagagccacaagtaaaagaaaaggttagtaaatgtaacaatacaaaagtagattttagaaaacctataattttaacattatgtattactggattagggggagcttgtaagataaaaaaaatcctagaggaaaatattaaaagtataactgaaaaggttgatatagaacctataggtatgattgaatatccaagtcttgatttagagataaaacaaataagcaatgataaaaatgtaatcgccatagttggaacaattgaccctcagatagcaaatatccctttttttagtctagtagacataaatgataaagcaaagttaaatcaaataaataacctaattgatacaaatcaaattggtgaaacaaataaaaaatatgaattatcagatttaatacataaagaagatatatttgtggatttacaggttaaatcaaaagaagaagttctaaaatatatgagtaaaaaacttagagagaaaggttatgtgacaaaaaatttctataaaaaagtagtggaaagagataacttatttccaactgaattatcagatgaaatagcaatacctcacacagatggaatagatgtaattaggccagctataagtatagccatcttaaagaagcctattgtgtggagtaaaagtaaagtaaaaataatacttttattagctgtagaccaaaagtgttttaatccattaagcactctactctcatttatagaaacagatgaatttaagaagataaaaaacattaaagatagagattttattagggagatgatattagatggagtcaatgaaaataattagtagcaatttaatttttaaaaatattgaagtgtctaacaatgaagatgcattaaagtttttgggacaacgtttgtttgacgaacagtatgtaaaagaaagctacatacaagctgttgtagcaagagaaaaaaagtatgctacaggattaccaacagaaatatacggagtggcaataccacatacagatatagtacatgtaaatgagccaggaatagcaattggaatactgaataaaccagtaaaatttataatgatgggtacagacgatactgaaattgatgtaaaagttgtatttatgttagcagtgaaagagccacaagaacaattgcaactattagaaaaacttatgactatatttcaagataagaatatactaaataatattgttgacttaagtgaagaaagtgtgagtgatttattaaactctaaattgaaaaattaaacatgtaaagtatattaaaaatgtaaaattaaacatgcaaagtatgttaaaaaatataaaaagattattaaagatttctaactatagatatctttaaaataaaataatttcaatgggggtgactaatgtgactaaaaagatattagttgcatgtggaacaggagtatgtacttcaacaattgctataaacaaattaaagaaagcacttcaagacattggtaaattggatatggttaatattacacaatgtaaagtagtagaagttgcatcaaaagcacctgattatgatttaataatttgtactacacaagtatctagtagtataaaaacaccagtgataaatggattaccttttttaactggtgtcggaatggataaattaatcaatgatgtattagaagagttagaattataattaaaaaaattaaggaacatggtctctaaaatcataagttttagagacttaaaattaaataatggagggtctttatatggagatattaaatttcattgttggtctaggtgcacaagtaatgatgccaataataatatgtatttttggtttgatattaggtacaaaactaggaaaatctttaagagctggtttaactgtgggagttgggtttataggtcttaacactattatagctttgctaacagataatttaggtccagctacacaacaaatggttaagaatttagggctaagtttatcaataatagatgtaggatggccagcagcatcagctatagcttttgcatcaacagtaggggctttaattattccaataggtcttgtggtaaatatagttatgctaattactaatactactcaaactgttgatgtagacatatgggattactggcattttgcttttacaggagctttagtggcaggggctactcaaagtgtaatgtggggagtatttgcagcagtagcaaatatggtaattgtattggtaatggcagatttaactgctccaggtatagaggaatatttaggtatgccaggtatatctcttcctcatggatttacacaggcatttgttccaattgctatagtagtaaataaattattagacctaataccaggtataaataagattgagataaatgctgatacattgcagaaaaaatttggattatttggagaacctttaataatggggtctgtaataggtgtaataattggtattgctgcgaaatatgatataaaaggaatattacaattaggtgtaactatgggagctgtattaatattaattccaaagatggcagcattattaatggaaggattattaccagtatcagaagctgcacaggaatttattgagaagagatttaaaaacagaggcaagatttatataggcttagattcagcagtaggaataggtcatcctgttacattatcagttgcactagtgttggttcctttgactatacttatagcagctatattgccaggaaataaagttttaccatttgcagatttagcagtaattccatttgcacttgtattaatcgtaccaattacaaagggaaatgtgtttagaacattaataataggaataattataattacttctggattattaatcgcaactaacttagctccattatttacccaaatggctttaaatgctagctttaaaatgcctgaaggagcaactatgatttcaagtatttgtgatggtgcgaatccattaagttgggtatttgtaaaagttatgaactataaagttattggaggagtagtttttggagttatagctttaggaatggctatttacaataggaatagaataataaatgaaaataaaaagctatctatagaagaataaggttaaaacaattttattaaggagtgtataggttatgaaaaaatataaatatgattctaaaaggtacttactcagtgttacaataccaggattttttatgattttaatattgatttatgcactgtttaataactatataaattttaatttgaatatatatagtttgttaataattgtctgtacttatggtatattcaatacttttatatcatcaagtaatcctaaaaaaattattattgacagcaaatgtatacattttacctcatttatgactacacataagtatgaaattaaagatatagaaaagataagaataagagaattttataataaaaaaatttatctaaaaattaatgatggagacctttttaaaggtaggtattggataagaacaaatatgtttaataatagtatagcattatatagttatttcattgagttggaagagtgcttatatccagattcactaagatttagaaataaaaaatttgagaataagaatatataaaaataaaaaattgaattgaagcctaacttaatcttttttgataagatataagtttgaactttatactaaatttttagaattttcaatcaagacaataacataatagctaagcaattagaacacaactaagatgtataaggcatgtatatgatgaatgggaggatttaattaatgttattagagaaattaagaaaagaagtattacaagcatctttagaccttttaaactataatttagtgacattaacaggagggaatgtaagtgggagagatgaacaaactggctatatagcaatcaccccaagtggaatggattatagaaatcttacaccaagtgatattgttatagtagatgtagatggaaatattatagatggaaaatggaaagcatcagtggatttatcagaccacttgtatatatataagcatagagaagacataaatagtataattcatacacattctacatactcaagttgttttgctattttaaatgaacctatagaatgcgcaagtacaactcttgcaaatgaagtagggggttcagtaccagttgcaaaattttcaccaccaacatttaaaaagatgggaaaatgtgttattgaagcaattggtgacaaaagagcatgtcttttagcaaatcatggcgtaattgcagttggtccatctgtaggacatgctcttacagccgctgtaatgttagaagattcagcaaaagtatattacttagcaaaatcaattggcacaccagtgctactgcctgatgaagaaattcaaagagcgagagatgtattttttaatgtctatggtcaggataaataaattagataaaattttaaaagtaatatgaaaatatagatattcaatgatattaaggagatttataatgatataataagtttaatagttaagaagtaaaatatgaaatgtaatagtatataaattcatttaagactaaaaataataagataaaataaaaaggagtctgtatttctatgtattacttattaaacaaaagcacaaatccttactttaatttggcattagaagaatatctatttttaaatgataaatataatgatgatattataatcatatggagaaatgaagactccatttttataggtaaaaatcaaaatccatatcaggaagtacatcatgatgttattgaaaagggagaaattcctattttaagaagaatatctggagggggcactgtttatcatgatttaggtaatatcaatatgtcattcatacaaaaagataggcaacttcatgagatagattttttggagcatactaagtttatgcaaaagatgctttcaaccttaggactagatgtatctataactgaaagaaaagatttatttttaaatgggaaaaaaatttcaggctctgcacagtctataaaaagaaaaaattctctttatcatggaactcttctttacgattcagatttaaataaattaactaaatatttaaattcaaataaagcaactgaatcaaatgcaactaaatctgtttcaagtaaagttacaaatattaagtttttactcgaaaaagatataaattactttttagattattgtgttgaatatttaaaatctaatataaagaatataaaagaacttgaattggatgaagaagatattaaaagtgtatacaatataggagaagataaatatagaaagatagagtggacatatggtaaaacgccgaaatttcaagtagtgctaccatttaataatgaaagtaaaataaatatacatgttaacagatggaaagtatcaaaattttttatttcttatgatgataatgtaattaatatggataagttgttagatttgaatttctttaaagaagaaataaaagagagtattttagaaaattatccacattacatagatttaatcaatttaatattttaatataaaacctctaatttgataaaattgtcttatatcaaactagaggtttttaatattcttgcatattaacaaccattacaaaattgtaaaattaaaaacaacactattgaaaaatcaatatatattgtaataaatatatgtgtttttcattagcaaatagacattaactatttatacaactgaaaatttaatatataattaatcagatggttaaaataaaaatattaaaagttttaataaatgatggttaaaaataaaatacgaggtgataccatgtacagtgttataattgttgcagcgggaagcggaaggagaatgaacttagatataaacaaacagttcataaaattaagagaaaaagaaattattgctcatacaattcaagttttttatgaaaatataaatatagatgaaatagtggtatgtataaaaaaagaagaagaggatttttttaaagaaaatataataaataagtataactttaaaaatataaaaatagcatatggcggaaaagaaagacaggactcaatatataatggtttaaaaaaattagatgaaaattgtgatatagtacttatccatgatggagcaagaccatttgtcgaccatagaataatcaacgaatctataaaggtagctaaagaaaaaaaggctgtggttgtaggtgttccagtaagtgatactataaagatagtgtcagatggaacagtacaagaaactccagaaagaaatttgttgtgggcagcacaaacccctcaaacctttgaatataatctcataatagatgcttatgagcaagcatataagaacaattattatggtactgatgattcaatgttggtagaaaatataggtcaaagtgtcactatggtaatgggttcttatgaaaacataaaaataactagtccagaagatttaaatatagcagaacaaatattaaatatggaaaaaagagatgaagttaacagtagaaggagaattatatgagaataggattaggatatgatgtacacaaattaacagagaatagaaaacttataatcggtggtgtagagataccacacgataaaggtttgttgggtcattctgatgctgatgtattgatacatgcaataatggattctattttaggtgctctagcattaggagatattgggaagcatttcccagatacagatgaagaatataagggagcagatagtatgaaattattagaacatgtgtataatctaataacaagtaaaggatataaaattggtaatatagatagtactataattgctcaaagccctaagatggctccatatattgagagtatgagaagtaatatatcaaaagttttaaacacagacattgataatataaacataaaggcaacaacagaagaaggtcttggttttacaggagcaaaacagggaatagcttcacaaagtatttgtttattattgttgacaagtcagaataattaatatattattagtaataagtttaatggatatcaagtaataggcctatatagaatatctataatgtatgaatttaagtgaaattaatataaatataaaattagctatgataaagaaatagtaaaatgatgaaatcttcacagagagaaaacggtggtgagagttttcaagaggaagtctttgaacctgtcttttagcttaaaggtataaaaatctttacggtaggaaccgttatattcccaaaagagagctattcatatagctaactagagtggtaccgcggaaattaaacctttcgtctctatacttgtatagagatgagaggttttttatattttcaggaagttaatattcaggaggaatctattaatgaaaatgtcaaaaatgtttatgccgacattaaaagaaatcccagcagatgctgagattacaagccatcaattaatggttaggtcaggcatgataaaaaaaatgacttcaggtgtttataaccaattaccaatggggttaagagtgttcaaaaaaattgaacaaataattagagaagaattaaataaaaaagattgtcaagaaatactttgtgcagccttacttccttctgaattatggaaagagtctggaaggtggactgctatgggtgaagaaatgtttagactaaaagacagaacagaaagagagtactgtcttgggccaacacatgaagaagcattcactgatataataagacaagaaattacttcatataaacaattgccactgaacttgtaccaaatacaagtaaaatatagagacgagagaagaccaagatttggtgttatgagaactaagacttttacaatgaaggatgcatatagttttgatgtagatgataaaggtttagataagtcatatcaagatatgtttgatgcatatgtaagtatatttgatagatgtggattggagaatagccctgtacaggcagattcaggagctataggaggttctacatcagccgaatttatggttaagtcagaagttggtgaagatgaagttgtattttgtagtggatgtgattatgcagccaatgtagaaagagcagaatcttgtaatctagcatcacaaaaagaagaaatgaaagaattagaagaggttcatacaccaggagcagctacaataaaagagttagaagaatttttaaaaacttctccagataagtttgctaaaactttagtatatgaggcagatggaaaaacagttgtagtcgttgtaagaggagatagagaagttaatgaaatcaaagtatctaatgctataggttctgttatagaatttgctcttgctacagatgatgtagtgagaaaagtaactaatgcagaagtaggatttgcaggtccaataggtataaatgctgactatgtatttatagataaagaaattgttgaacaaagaaacatagttgttggggctaataaaactgagtaccatataaaaaatgctaactatggaagagattttgaaggaatagttggagattttagaaatgttcaagaaggcgaccagtgtatagtatgtggtaagccacttgaaatagctagaggtgttgaagtaggacatatatttaaactaggaactaagtactcagaatctatgaatgcaaacttcatagacaaagatggaaaatcaaagcctatagtaatgggatgttatggaataggtgttgaaagaacagcagcagctataattgaacaacataatgatgagaaaggtataatatggcctttgtcagtagctccataccatgttgtgatagttccagcaaatatgaaaaatgaagaacaaatatcaatagctgaaaatatatataatgatttgcaagctatgggtgtagaagttttattagatgacagagatgaaagaataggtgtcaaattcaatgattcagaattaataggaatacctatgaggattacagtaggtaaaaatattaatgaaggtaaagtagaatttaaacttagacataaagaagataaagagataattgacatagaagaaataaatgaaaaagtaaaggcagagtttatcaggaataatgttaggttaggataataacttaaataagatattgtatagataatcaaagttgtactttatagacaccattttatctatatataaggatataaaatggtgtttttttataaaacaaataaatgaggaggtaattgaaatggcaaaaaatgaaaaacaatttgttgaagaaataacaaagatggaagatgattttccacaatggtacacagatgtaataactaagactgacttagttgattatgcaccagtaaaaggttttatggttgtaaagccatatggatatgcattatgggaaaagatgcaagaatttatggataaaaaatttaaagaaactggacataaaaactgttattttccattattaataccagagagtttattaaacaaagaagcagaacacgttgaaggttttgctccagaagttgcatgggtaacacatggaggaaataaaaaattagaagaaagattatgtgtaagacctacttcagagactataatatgtacaatgtatgcgaaatggttaaaatcatatagagaattaccatatctttataatcaatggtgctcagttgttagatgggaaaaatcaactagacctttcttaagaacatctgagtttttatggcaagaaggtcatacattacatgaaacagcagaagaagcacaagaagaaacaatacaacaattagaagtatataaagcgttatgtgaagaattacttgcaatgccagttgtagctggtcaaaaaagtgaaagtgagaaatttgcaggtggtgaaagaacatatactatagaagctatgatgcatgatggtaaagcattacaatcagggacaagtcacttcctaggtcaacactttactaaggcttttgatattacttttgcagatagagaaggaaatttagctaatccataccatacatcttggggagcatctacaagacttataggtggacttataatgactcatagtgataacagaggtttagtattaccaccaagagtagctccaattcaagttgttatagttcctatagctgctaaaaaaggaaatgtaatggagactgttgataaaatatatgctgatttaaaaactaagggagtagccgtagaagttgatgatagagataactatacaactggatggaaatttaatgagtgggaaatgaaaggtgctccagtaagagttgaaattggaccaaaagatatagaaaataatcaagctatggtatttagaagagatactttagaaaaggattctatgcctttagaaggattagctgatgctatatgtgatttatttgatgttatacacaatgatatgtttgaaaaagcaagaaaacatagagaagacaatacatctatagttgaaaatatggatgagtttagaaaagctttagaagaaaagccaggattcataaagactatgtggtgtggagatgcagaatgtgaagctaagattaaggaagaaacaggagcaactataagatgcttaccttttgaacaagaaaacttaggtcacaagtgtgtgtactgtggaaaagaagcagatagtatggtagtaatggcaaaagcttactaaaatacatttaaataaaaactggggtagaaagtatttaatactttatcccagtttttttgttttttatgagtaataaaatgtatttgtaactatgtcataagataagtcatagatacttatattaaaaagaatataatagagaactatttttaataattacatattaatgaaagcaaaatatttttgttatatagattttcaataaagcaaacaataaatataaatgaatattagtaaggagtgcttttaatttttagaaaataaatgacttaaaagaaagatttatgaaattaaaactaggattttctgatataataaacatgtgtatttttaaataaaaaggatattattattagatttgattaaaaataaacttgcaaaacaatgtactagtttaatattatagttatattgaataaaatatcaggaggaagtaaaaatgaatgtaagagtaaggtttgcaccaagtccaacaggatttgtacatataggtagtttgagaactgctttatataactatttatttgcaaaaaaaatgggtggagaatatatattaagagtggaagatacagaccaaagtagattagtagaaggtgctatagagaatatgcttaatgctatgaaatgggctggtgtcaaccatagtgaaggtgttatattagatgatagtggaaaagtagtacaaaaaggagaatatggtccatatattcaatctcaaagattagatatataccaagaatatataaagcaacttttagatagtggaaaagcttattattgtttctgtacaaaagaaagactggatgaagtaagagatgctcaaagagcagcaggagaaacagctaaatatgatggtcattgtaagaatctttctaaagaagaagtagaagcgaatataaaagcaggaataccatatgttataagattaagattgccagagaatcatacaattaagtttacagacttagttagaggagatatggaatttaatactaatgacctagatgaccaagtattaatgaaaacagatggatttccaacttatcattttgcagtagttgttgatgactatttgatgaaaattacacatgttataagaggagaagaatgggtatcatctactccaaaacatgtttatttatatgaagcttttggatgggaagcacctgtatttgtgcatttaccaaatatacttaataaagaaaagaaaaaattaagtaaaagacaaggtgatgtagctgttgaagactttaagaaaaaaggatatttaccagagggattagtaaactatgtagcattagttggttggtctcctgaagataatcaagaattgtttacaatggaggaattagaaaaagccttctctgtagaaagagtatctaaaagtggtggagtatttgatactgaaaaattaaattgggttaatcagcactatataaaagatggtgatgatgcttatctaacagacttagcaataccatttttagtagaagatggatttataacagaagaagaagctactaataaatatgatttcttaaagagtatgatatcagtacttaaagagaaattacaatatgtaaaagaaattactgaacatgcaagtatattttttggagataaaatagaggtagaaactgaagagggaagagagttcttaagattagaacatatacctactttaatagatgctttgagagaaaaaatagaaaaaacagaggtattaaatgctgagtttgttcaagctatgcttaaagaaatacaaaaagagtacaaaataaaagggaaaaatttatttatgggctcaagaataattttgacagggcaaatgcatggtccagatttaccaaaagtaatggaagttttaggaaaagaaacttgcttaaatagaatagcttatgtaaaaaataatatattatagtcataaaagtccgctaatttagaagcggactttttttgtgttagtatttggtgaaaatatctgcttaagaaaatgaaggtatttaaggtaataaatttaatatataaaaagcaaagcaaaaatataaataaaatatgaataataaactaataaaatattaagcatagaagaagggaatctattattttagtttgatttaattattaagggggtaattactatgtatagtaatattgatgatgttaaaaaggaattaaaggagctatgcttagaatatgttacaattttagaaaaattaaaagatgaaaaaatgattacagaagaaacttttgaaaagtgctcttctcaaaaaaaaatatttttagaagaacaatagaggatggtaatagtattattattatgtagtttgaaagatagtacgaaaaatgatagtaatactattatttattgcaattttcaactataatataatatataatgttaagaagataatttataaaaatacagtgaggtgatgagtgtgaaagtttataatacattgactagaacaaaagaagaatttgttccattagaagaaggaaaggtaaaaatgtatgtgtgtggtccaacagtttataactatatacacataggtaatgcaagaccatttataatatttgatactctaagaaggtatttagagtatagaggatacgatgtaacttatgtacaaaactttacagatgttgatgataagattataaatagaagtcatgaggagggaatatctcctgaagaagttgcggctaagtatataaaagaatattttgtagactgtgatgggctagggataaaaagagctactgttcatcctcaggttacagataatatacaacagattatagagtttataaaagagttggaagataagggatatgcatatgcagtaaatggtgatgtatattttgatacaaataaatttgaaggttatggaaaactttcaggtcaaaaacaagaagatttagaggcaggggctagaattgaggttaatgaccaaaaaagacatcctatggactttgttctttggaaggcaaaaaaagaaggtgagccaggatgggatagcccttggggagaaggtagaccaggatggcatatagaatgttctgttatgtctaagagatatttaggtgaaacaattgatatacatgcaggtgggcaagatttaacattcccacatcatgaaaatgaaatagctcaaagtgaagctagaagtggaaaaatattctcaaaatactggatgcataatggatatataaatataaatgatgaaaagatgagtaaatcaaaaggtaatttctttacagtaagagatatatcaaaattatatgatttagagatagtaagatttttcatgttatcagcacattatagaaatccagtaaactttagtgatgagatgttaaatcaagctaaagcaggtcttgaaagactatataatactaaagaaaaattagaatttacgctaagtaatttagtagaatctcctttaacagaaaaagaagtagagcttgttaaagaattagatgactttagacaaaaattcatagatgctatggatgatgatgttaatacagcagacgcagtaagtgtaatatttgaattagctaagttaataaattctaatgtagatgaaaattcttctttggagtttgctaaaaaatgcttagatgaatttaatgaacttacaggagtattaaatattgtaaataagaaaaaggatactgtattagataaagacattgaagaattgatacaaaaaagaactgatgcaaagaaaaataaagagtttcaattagctgatgatattagacaacaattactagatatgggaattgtattagaagacacaagacaaggtgttaagtggaaaaggatataaaaatggaaaaaactgaattagttactatgtcaccattagttttagcatacttaggtgatacagtgtatgagacatatataagagaatatttaattagacagaatacacaaagaaaagttaatgatttgcataaactagctataaagtatgtaaaagctaaagctcaggcaactataattcatgaaattgaaattgagttaactgaagaagagagtaaaatttataaaaggggaagaaatcaaaagtcaaatacttctcctaagaatgcagatattatagactacaaacatgcaactgggtttgaggcattagtgggatatttgtatttaaataatgaaatagagagacttcaatatattatcaataaaggaatcaaaattattgaaagagatatgtaaatattaaagagtgttgtcttaataataagtaataaggcaacactttttttataactaatgtataataaatatatagaaattagtaatgagaaaggataagaaagttatgaaagtaaaattaatatcacatacacctgaaccagaaaaagtaatagctatggcagctaagctatgttattcaccagttgggacagacgaaatagaaaaagatttctaaaatatattaaagagcattcctataacaaatactatggcggttggaatctatgagaagttatagatatagaattatgtaaattatttggaaaaaacaggtttgaaaattagccatgttggtatttctaggttacttaaggaagatcaaacataaataagctgagttgtcttaggtgcactatgtacaacattagaatgtgaagttgaagatttattacttcaaacgaacgatggtactaagaaaaacaatgatgaaatgattaattaataataaaggtaaggaggtagtatatgagtttagcagataaaatttttattgatatgtgtaataatattcttgaaaatggagtatcatcagatggagaggtagttagagcaaaatgggatgatggccagcctgctcatacaataaagaagttttgtgtagtaaataggtatgatctttcaaaagaattcccaatacttacactaagaccaacaaacttaaaagcagcaatagatgaattactttggatatggcaaaaaaaatctaataatataaatgatttgaatagccgtatttgggatagctgggctgatgaaacaggttcaatagggaaagcttatggataccaaattggacagaaacataaatacaaagaaggagaatttgaccaaatagatagagtgatttatgacttgaaatataatccttatagtaggagaattataactaatatatataatcataatgatttaaatgaaatgaatttatatccttgtgcatatagtatgacatttaatgtaactggaaatagattgaatgcaatattaaatcaaagatcaaatgatattttggtagctaataattggaatgtaactcagtatgcaattttagttcacatgttagcacaaataagtgatttggaagtaggcgaattggttcatgttatagcggatgcacatatatatgatagacatattcctctagttaaagagcttattaatagagaatcttatgatgcaccaaaattaataataaatccaaacataaagaatttctatgactttagagttgaggactttacattagaaaattataaaagtgggccacaaatcaaaaagattcctgtggcaatttagaaggagttatttatgaaagttatagtagctgtagatttaaattggggaattggttatggtggaaagttactacagtcgattcctgaagatatgaaattttttaaagaaaaaactgtaggtaatgtagttgtaatggggagagaaacctttaaatcattaccaggaaaaaaagcattaaaagatagagtgaatatagtcttgactagaagtaaatcttttaatgatgatagattgattgtttgtaattctatagatgaaactcttaaggaactacaaaaatatgaaaatgataaaatttttataataggtggagaaacagtatataaacaatttttaccttattgtaatgaactatatgtaacaaaaatacagaagacatatgaggcggatagatttttccctaatatagatattatgtcaaactgggatttgattaaagaaagtgaagtaaaagaatataacaatataagatatgttttttcaacatatataaataatagtttataggtttgtataggagagaaatttaatttatgaaaaaggatatatttgtaaatagagtttctaatgctttagaaaatgatagaggcgcagtttttgtaggtagtggtatatcgtttagttcgactgaagttgattggtttaaattactggagccattagtaaatgaacttgatataacattagacaataaaagtgatgatttacctatgattgctcagtacatagtaaataattattcaggaaatagagggcctttagtaaacgaaatatcaaaaacatttaatagaaagtttaaactaaacaagtatcataagtatttagcaacaactaaactttcaacaatatggacaactaattatgatatgttgttagaagatgcattttatgattttgatacatcggttaaagtaagtgatgattctattacaaggaatagactagaatatgatgtggaaattataaaaatgcatggatgtatttctagatccgattggaatgaaatagttataactcaagaagattatgatgatttttcaataaataaaccagctatatctcaaagattaagtgaagatttaataaataagtcttttctatttattggatatagctatagagatccaaatataagaaatataatgataaatgctagaaggctaagtaaaaaacatactcaacaacattatataattttaaaaaagttaaaagatagtgatagtaatattacgcaagatgatgtagtaagacaagaactttggtgcaatgatttaaaacgtttgggaatttcaactttatttatagatgaatactcagagttagaggaacttttaagagagataagtcaaaaatcaagaggtaaaacagtatatgtgacaggttctcataaagaaagcaatatgaatgcaagaaaattaggaaccaagctagcaaaacataaagatattactttactaagtggtcaatcatctggtattggctcagaggtagttgctgcgtttactgaagagtgtattaagagtaaagaagatattataaatagaatgaaaatatttcctaatccatattcagctgatgaaaaatactctgatgatattactttaataccagatttaaagaaatgtagaactaaaatgttgaattcaacacaagttgtagttgtatttagtggaggtataggtactgaagcagagatagatgttgctataaaacaaaactgtaatataattcctgttataacatgtaaagaggatagagagaatccagctataaaaaaaatcttaaactatagtgataatatgaaaaatatagaaataaaagatgctacctattataataaaatagtagatgaagatggtgttgtaacaatggaggaaatttatatatgcatatcaaaaataatgaattaaaacatgacattattaaattgaaaaaaagaaatggatttattgaagttggaaaagataaaaaaacgttggtaaactgtttaattggagcgaatgaattagaggattacaaatatgaaataaaaaaaatagattgtatacttaatatatcagaaaaaccagatatagtttcagatttaagtactaaaagaagaaaaataagtgaatctatatggtataagatagttaaagatacacctttcgtatctgctacactgcccatatacttagttagtaaaaataataataaaatagatagtaatgaattattagatataattattgagcagatggaaaatggagttgggatgataacgattcatccaacagcaaataaacaaatttttgaggattctaagaatagaatggtacctgtcacatctagaggtggaggtatggtaatacaagatttaatctcaaaaaatttttcagaagataatgtgtatttgaaaatattgccagaaattataaagtatgctcaaaaacataatgtttgtatcagtctaggtgcaacatttagatcaggaaacatatttgattctaatgatagagcacagataacagaaattaagagtcaaatagaattagctaagaggatatataaaagtaatgtcggggttattattgaatcaccaggtcattcaagaccaagtgacataattaaaatatcgtcaatattaaaaaaagaaggtttcccaattatgccactaggaccaataccaacagatattgcaataggaatggatcatatcgctgcagctattggtgctacaattatgggtatagaaggatgtgcaaatataatatcaactgtcacacgagaagaacatactggagggagaccttctattgaatccacagttgaatctataagaacagcaaaaatagctgctcatattattgatatacatcaaatgaatgatattaacttagatatgagtgtatctaagtctagagctaaatctaacacctgtatatttgggaaagatacaagatattgtgacagatgtagagaactgtgtcctttgtgcattagataaaaattatattcaagttaattcaataaaaaagattggataaaaatacatcgtatagctagtttttcacaacagagtcaaagatatgtcaaattagagcaatttgaatacataattcctccagaaatagaaaaaatagaaaaagcaaaagagttatttataaattcaatgaaaaaataccaagaggattatgataaattagtagagatactatttgaaaatcattataacaaactaataaaaggtggtaaaaacgagaaaacatcaaaaagacaagttgagaagaaagcaatagaagatgctagatacgtatttccaaatgcgtgtgaaacaaagatggtatttactataaatgctagaagtttgtttaatttctttgaacatagatgttatgaaaatgggagttgtctagaaggaactatgacttgtggagatatagttcaagttagaaaaaaatttaagaacttgtaggaggtgaataatttggcgagtatagaaggaagaaatccggtaatagaagcaataaaaagtgacagagaaatagataaaatattaattgcaaattcagctaaagaaggttcaattaagaaaataataggaatggctaaagataagaatataattattcagtatgttgataaacataagctagatgaagtaagtacaagtcattcacatcaaggtgtaatagcttatgcaagtgagtataagtattatgaattagatgagctaatagatttagcaaagaataaagatgaagacccatttttcattatattagatgagataacagacccacataatttgggttcaataataaggacagcagatgcagtaggagcacatggagttatcattccaaaaagaaggtctgtacacataactcctgtagttgccaaagcatctgctggagcagtagaatatatgccagtttgcaaggtaaccaatatagttaatacaataaaaagactcaaagaagaagggctgtggattgctgcagctgatatggatggagaaactttttataaacaaaatcttactggtcctcttggtgtagtaattggaagtgaaggttttggaatatctagattggttaaacaaaactgtgactttatagtaaaaatgccaatgataggtaatgttacatctttaaatgcatctgtagcaggtggaatacttttatatgagatattcagacaaagactggataaaagtaaataggcatgaaaaaaaatataaatcattacttaataatagatggctacaatattataaatgcgtgggacaatttgaaagaactggctaaagaggacttagaagattctcgagaaaagcttattgatgacattatagaattttctgagtttatgggttataagactataatagtttttgatgcttataatgttaaaaattctcgagaaaaagttgaaaaaagaaaacacataacaatagtttatacaagagaacaccaaacagcagatagttatatagagaaatttataacttctttatcaaagtatgatgatgtaaaagtagccactaatgactatgcagaacagcaaatgattttaggaaaaggtgctactagaatgtctgcaagagaattaaagttagagttagatcgttccaagaataaaatgaaggaaaaaaatatcggtttgaggaaaaaaattcagcgaaattggttggaggaaaggttagataaagaaacattgtcgaaacttgagaacattcgtagaaagcgttgaaattactaggttctttagactataatatacctataaatttgttttatatatgggggagatttacatgttggtagcaaaagaaaaaagttatgagttagtggacaattgtcagcaggatgagtataacattgtattaagagcaagtgaaggggataaaatagcactagagtacattattactaaatacagaaattttgtaaaggcaaaagcaaagtcatattttttaattggagcagataaagaagatataatacaagaaggaatgataggcctttataaggcagttagagattttgatggaagtaagaccaattcatttaaatgttttgcggagatatgtataacaagacaaataataactgctataaaaactgcaacaagacaaaaacatatacctttaaattcatatgtttctttgaataaaccaatatatgatgaagagtcagacagaacacttttagatattatagctacaagtatagtaacagatccagaagagcttataattagtaaagaagagttaaaaaatatagaatcaaaaatgaacgaattgttaagtgacttggaattagaagtactagaattatatttaaatggaaagtcataccagtttatagcggacaagcttaaaagagatgtaaagtcaatagataacgctttacaaagggttaagagaaaattagaaaaacatcttgaaaacagaaatgattaatagtaaaatacttaccataagcttattgtgagcaaaattaatttatatcgaaagataagggaggaaattcaaaatggctaaagctaaatacgaaagaacaaaacctcatgttaatatagggacaataggacacgtagaccacggtaaaactacattaacagcagcaataacaaaaacattatatgacagatatcaattaggagaagcagtagatttcgcaaacatagataaagctccagaagaaagagaaagaggaatcacaatatcaacagcacacgttgagtatgaaacaccaaatagacactatgcacacgttgactgcccaggacatgctgactacgttaagaacatgataacaggagcagcacaaatggacggagcaatattagtttgttcagcaacagatggaccaatgccacaaacaagagagcatatactattatcaagacaagttggagtaccatatatagtagtattcttaaacaaatgtgacatggtagatgatgaagagttattagagttagtagagatggaagtaagagatttattaacagaatatgatttcccaggagatgacactccaatagtaagaggttcagcattaatggcattagaagatccaaagagcgagtggggagataagatagtagaattattcgagcaaatagatgagtatataccagctccagagagagatacagataagccattcttaatgccagtagaggatgtattctcaatcacaggaagaggaacagttgcaacaggaagagtggaaagaggagtactaaaagtacaagacgaagtagaattagtaggattaacagaagcaccaagaaaagtagtagtaacaggagtagagatgttcagaaaattattagaccaagcacaagcaggggataatataggagcattattaagaggagtacaaagaaacgagatagaaagaggacaagtactagcaaagactggatcagtaaaggcacacacaaagtttacagcagaagtatatgtacttaaaaaagaagagggtggaagacatacaccattctttgatggatatagaccacaattctatttcagaacaacagacgtaacaggagcttgtaagttaccagaaggaatagagatggtaatgcctggagataacgtaacaatggaagtagacttaataaactcaatagttgtagaagagggattaagattctcaataagagaaggtggaagaacagtagcttcaggagttgttgctacaataatagagtaattctttactaaactgatggattaaaaggaataacaaaaagaggggttaggctcctctttttttaacatagaaatacaaaaacattgacacagcataggattttgtgataacttatacaaggtaatgattataggaagttaataatatcttgaatactgtagatttttaataaatacatattttaaagatattatattcacatatattaacaatatatattattgtattacaaagttggaggtgtatcagatgagagttaaagtaactttagcatgtacagagtgtaagcaaagaaactacaacactactaagaataagaaaaataatccagacagaatagaattacaaaaatattgtagattctgtaaaaagcatacaactcataaagaaacaaaatagttttttataaggatgtgagtatggaatggctgcccaaaaaaatgacggtgcaaaaactaaaaaaaggtttagtttatttggatatttaaaagaaactaagcaagaattaaaaagagttacatggccgacaaaaaaggaactgtttaaaaacacaagtatagttttaactgtagttatttcatgcactatattagtatggggtatagacactatattatctggtgcactagcgttattactaaaatagacgaaaagaggtaagttaaatgtcagaattacaagaagcaagttggtatgtagttcatacctattcgggacatgaaaataaagttaaagctacaattgagaaagcagttaaaacaagaggtatggaagactgcataagacaagtagttgttccaacagaagaggtagtggaaactactaaaactggaaaagaaaaaactagacaacgtaaagtttatccaagttatgtcttggttaaaatgataataactgatgaatcttggtatgtagtaagaaatactaagggagttacaggtttcgttggacctggttcaaaaccagtaccattaagtgaagatgaagtcaaagctatggggatagatacaacagaccctaaagtagtaaatagcgatgttgattttgaaataggagacacagtaaaagtatctcaaggaccatttagtggacaaataggtaacatagaagaaattgacttagaaaatagagaagtcaaagtatgcataaatgcatttggtaaaaggactctatttgtaatagagcttgaaggtatagaaaaaatctaatactatatagaaaaatctgaggaggtgcgctcaaaatggctaaaaaagttataggtcaaataaaattacaaatacctgcaggaaaggctactccagcgccaccagttggaccagcattaggacaacatggtgttaatataatgggattcacaaaagaatttaatgctaaaactgcagatcaagctggaatgataataccagttgttataactgtatatcaagatagatcattcagttttataacaaaaactccaccagctgcagttttaattaaaaaagcattaaacttaaaatcaggttctggagaaccaaacaaaaagaaagttgctaaaatgacttcagctcaagtaagagaaatagctgagttaaaaatgcctgacttaaatgctgcatcagtagaagctgctatgagtatgatagctggtactgctagaagcatgggtgttgtaatcgaagactaattaaaagatacactttttttataaagtgggaggcgagaagccgaaattaaccacaaggaggaaaataaaatggctaaaaaaggtaaaagatatgcaggtgcattacaaaaagtagatagaactaaattttatgatgcatcagaagcattaacattagtttcagatatagctggagctaaatttgatgagacagtagaagcacacattaaattaggtgttgactcaagacatgctgaccaacaagtaagaggtgcagttgtattacctcatggaactggtaaaacaaaaagagttttagtttttgctaaaggtgaaaaagctaaagaagctgaacaagctggtgctgactttgtaggagctgaagaattagttcaaaaaatacaaggtgaaaactggtttgactttgatatagtagttgctactccagatatgatgggtgtagtaggtagattaggtagagtattaggacctaaaggtttaatgccaaaccctaaatcaggaacagttacatttgatgtagctaaagctatagatgaaataaaagctggtaaagttgaatacagattagacaaaactaacataatacacgttccagtaggaaaagtatcatttggtggagaaaaattaactgaaaactttactgcattaatggatgctataataaaagctaaaccagctgctgctaaaggacaatatttaagaagtataacagtagcttcttcaatgggacctggagttaaaataaacccagcaagaacagctgaataataaaactgttgacacaggttgacaaaaatgttattatatcacttgtcaatgtaaaaaagaatagatttgccgtagatagtgggtgcgaaagcttaatatcccgccgaggttttagataaattgagattactaaagcttttgatgtctacttttggcaacaaaagctttttataatgttgcggtaaatattaagcctatttggtgaaggaggtgcacatctatatgagaaaagctatagaaattaaatcagaagttgtttctgagatagttgaaaagttacaaaaatcttctgctgctgttgttgtagattacaaaggattaacagttgaagaagtaactgagttaagaaaacaaatgagagaagctggtgtagattacaaagtatacaaaaatactttagttagaagagcagctaaagaagttggtatagagcaatttaatgatgaattattagttggaactaatgccatagcatttggatatgatgatccagttgctccagctagaatattaaaaggattcatggattctcatccaaaaatgaaattaaagatgggtattgtggaaggtgcattctatgatgaatctaagattgttgaaatggctaacataccatcaagagaagttcttatcgctaaattacttggtagcttaaaagctccagtatcaaacttcgcatacttaatagatgcaatagcgaaaaaggcagaaggtcaagaagaagcttaattgcttaactaaaaaattataaatattaatttgaaataaaattcggaggtgctaaaaatgacaatagaacaaatattagaagctatagaaaatatgaaagttttagaattaaatgaattagttaaagctgctgaagaaaaattcggtgtatcagcttcagctccagtaatggtagctggtgcagctgctggtggaccagctgctgaagaaaaaactgagtttgatgtagtattaactgacgttggttcttcaaaagttggagttataaaagcagttagagaaataacaggattaggattaaaagaagctaaagaagtagttgacaatgctcctaagacagttaaagaaggagcttctaaagaagaagctgatcaaataaaagagaaattagaagctgctggagctaaagtagaagttaagtagtttctttaaaaagatacccattgggtatctttttttatttataaaaaactataaagaaagtatttggaattataaagaaagtgtttttataaaataaaaaaaatttatataatagtactaaattaagggtatcatatatggtgtaatggtattttaatttaacattattatcaaattaaaatataaacaattgttgtaatgtctgtatataaagtatataattaaactaaaatgtaaaattttacattttagtttaaaaaaatacacgagtgttttataaataaaatgtaataaataattaattaacaaatataaattttaaaataagttagatatttagaaaaatcgaaatttgtaggatttaaaggacatattcaaggaggagttaataatggaaaaattacaaggaaaaattgcagtagttactgcagcaacaaaaggtattggattagcatcagcagagatattagcaaaaaatggagcaactgtgtacttagcagctcgttcagaagaattagctaatgaagttataaataaaataagtgcagaaggtggttgtgctaagtttgtttactttaatgctcgtgaagaagagacctttacctcaatgatagaagaggtagttaaaaaagaaggtaagatagatatacttgtaaacaattttggttcaacaaacccttctcttgacaaagaccttgtaactggggatacagataatttctttgacacagtaaatactaatttaaaaagtgtgtatttaccatgtaaagcagcaattcctcatatgataaagaatggaaaaggaagtatagtaaatatatcaagtataggttcagtattacctgatttatctagaatagcttactgtgtatcaaaagcagcaatcaactcattaactcaaaacatagctacacaatatgctaaagacaatgttagatgtaatgctgtacttccagggcttattgcaactaaagcagcattagacaatatgtctccagagttcataaaagaatttttaaagcatgttcctttaaatcgtataggggaaccagatgatatagcaaaagctgttctattctatgctagtgatgactcatcatttataacaggggatttacttgaagttgcaggaggatttggtttacctactccacaatttgcagataatatattaggataattaaattactaatatgcaatgaaagcttatgcattagttatagtagaaatgatatttttataaaggccatagatataatttatattggaaaggtttgaggttcaaaattccaagttaaatttatttatggtctttattttgtatattttaataaattgtatatatttgtataaatgtaattatttacaatcattttaatatggaattataattaaataggggggatggtacttgtataaaattttttatagaaaattagacctataaatgaaaaatatggattttatattggaaaattgtacataatacataatatatgcttaaaataatttacaaaaaatcaaaaataatgcatagtttacatataagataaaaaatatattgaaaaatacttgacattatgctaaaattattagatgcgttagaatgaactattgttttatttttaattattgagaggtgaaaagtgaatgccacatcctgtcacgataggtaaaagaactagaatgagcttttctaaaattaaggaaatagctgatgtgccaaatcttatagaaattcaagtagattcctatgagtggtttttaaaagaaggtttaaaagaagtgtttgatgatatttcaccaatagaagattatactggtaatcttatattggaatttgtcgactattctctagatgataaaccaaagtacgatatagaagagtgtaaagagagagatgctacatattgtgcacctctaaaggttaaggtaagacttataaataaagaaacaggtgagataaaagaacaagaagtgtttatgggtgacttccctttaatgacagaaagaggaactttcgttataaatggagcagaaagagttatagtaagtcaattagttagatctcctggtgtttactatgcggaagaaagagataaaacaggtaagagattgatttcatctactgtaattcctaatagaggagcatggttagaatatgaaacagattctaatgatgtaatatctgtaagagttgatagaacaagaaaacaaccagttacagttttacttagagctttaggaataggaacagatgcagagataattgaccttttaggagaagatgagagattatctgctacattagaaaaagataatactaagacagtagaagaaggtcttgtagagatatacaaaaaattaagaccaggtgaacctcctactgtagaaagtgcatcatctttattaaatgctttattctttgacccaaaaagatatgacctagcaaaagttggtagatataaattcaataagaaacttgctttatgttatagaataatgaataaaatttcagcagaagacataataaatccagaaactggagaagtatttgtaaaagctggagaaaaaataagctatgatttggctaaagccatacaaaatgcaggtataaatgtagtaaatctactaatggatgatgataaaaaagttagagttataggaaataattttgtggatattaagtctcacattgattttgacatagatgatttaaacataaaagaaaaagtacattatccaactttaaaagaaattttagatggatatagtgatgaagaagaaataaaagaggctataaaatcaagaattaaagaacttataccaaaacatatattattagatgatataatagcttcaataagttatgagttcaatatattctataatataggaaatattgatgatatagatcacctaggaaacagaagaataagatctgtaggtgaattgttacaaaatcaagttagaattggtctttcaagaatggaaagagttataaaagaaagaatgacggttcaagatatggaagctataacgcctcaagcgttagttaacataagaccagtttcagctgcaataaaagaattttttggtagttctcagttatctcagttcatggatcaaacaaatcctctatctgagttaacgcataagagaagattatcagcccttgggcctggaggtctttcaagagaaagagctggattcgaagtgcgtgacgttcaccattcacactatggtagaatgtgtccaatagagactccagagggaccaaatatcggtcttataaactctctaggaacttatgcaaaaataaatgaatttggatttatagaatcaccatatagaaaatttgataaagaaacatcaacagttactgatgaaatacattatttaactgctgacgaagaagatttattcgtaagagctcaggcaaatgagccattaacagaagatggtaaattcgtaaaccatagagttgtttgtagaactgtaaatggtgctgttgaaatggttcctgaaagtagagtagattacatggatatatctcctaagcaggttgtatctgttgccactgctatgatacctttcttagaaaatgatgatgccaaccgtgcccttatgggagcgaacatgcagcgtcaggcagtgcctctagttagaagagaagcaccaattataggaactggtatagaatacagagcagcaaaagactctggagcagttgttgttgctagaaattctggtatagcagaaagagtaacagcagatgaaataattataaaaagagaagatggaaacagagatagatataatctacttaagtttaaacgttcaaactcaggtacttgtataaatcaaacacctataataaataagggtgaccagataataaaaggtgatgttatagcagatggtccagcaactgatttaggagaagttgcacttggaagaaactgtcttatagcattcatgacttgggaaggttataactacgaggatgctatattaataaatgaaagattagttaaagaagatagattatcaacaattcatatagaagaatatgaatgtgaagctagagatacaaaactagggccagaggaaataactagagatatacctaatgttggagatagtgcaatcaaaaacttagatgatagaggtataataagaataggtgcagaagtagactcaggtgatatattagttggtaaggtaactccaaaaggagaaactgaacttactgctgaggaaagattacttcgtgcgatattcggagaaaaagccagggaagttagagatacttcacttaaagtacctcatggtgaatctggtataatagttgatgtaaaagtatttactagagaaaatggagatgatttatctccaggagtaaatgaattagtaagatgttatatagctaaaaagagaaagataaaagttggagataagatggctggtcgtcatggtaataaaggggttatctcgagagtattacctgaagaagatatgccattcatggaaaatggaacgccattagatataatacttaacccacaaggtataccatcacgtatgaacatcggtcaggttctagaagttcatttaggacttgctgctaagacattaggatggtatgtagcaacatcagtattcgatggtgctaatgagtatgacataatggatgctcttgaagaagctggatatcctagagatggtaaattaactttatatgatggtagaacaggtcaatcttttgacaatagaataactgttggatatatgtattacttgaaactacatcacttagtagatgaaaaactacatgcaagaagtactggaccatactcattagttactcaacagccactaggtggtaaagcacaatttggtggacaaagatttggagagatggaggtttgggctctagaagcatatggagcggctcacatacttcaagagatacttactgttaagtctgatgatgttgtaggtcgtgttagaacttatgaagctatagttaaaggtgaaaacatacctgagccaggaatcccagaatcatttaaggttcttataaaggaacttcaaagtttatgcttagatgtaaaagtattgacagatgaagaccaagaaatagaagtaagagaatctgtagatgaagatgatacgataggtgaatttgagctagacgttgtaaatcacatgggagaagttgaagaaagtaatataatagaagaaattgaagatgattttgtggaagccacagaagatgaggatatagagaatttagaagaattcactgaagatgatttatttgaagaagaaatagattttgaaagtgatgactttgatatgtaaatttaattaatgtaaatctcaaatagaagggagagaactccttgtttgaattaaacaatttcgagtcgataaaaatagcattggcttctccagaaaaaataagacaatggtctagaggagaagttaaaaagccagaaactataaattaccgtactttaaagccagaaaaagatggtcttttctgtgaaaggatatttggaccacaaaaagactgggagtgtcattgtggtaaatatagaagagttagatataaaggtgtagtttgtgatagatgtggagtagaagtaactaaatcaaaagtaagaagagagagaatgggacatatagagctagctgctcctatgtctcacatctggtacttcaaaggtataccaagtagaatgggacttttacttgatatgtcaccaagatcgttagaaaaaatactatatttcgcctcatatgtagtagttgatccaggtgaaactggattgaatgaaaaacagttacttacagaaaaagaatacagaactgctcttgaaaagtatggatatacttttactgtgggtatgggtgctgaagctgtaaaaacattactacaaaatatagatttagaacaacaaagtaaagacttaagagcggaattaaaagatagtacaggacaaaagaaagtaagaacaattagaagattagaagttgtagaagcatttaaaaaatctggaaataaaccagaatggatgattttagatgcaataccagtaataccgccagatttaagaccaatggtacaacttgatggtggaagatttgcaacttcagacctaaatgatttatacagaagagttataaatagaaataatagacttaaaagactattagagcttggagctccagatataattgtaagaaatgaaaaaagaatgcttcaagaagctgttgatgcattgatagataatggtagaagaggtagacctgtaacaggacctggaaatagaccacttaaatctttatcagatatgttaaaaggtaagcaaggtcgtttccgtcaaaacttacttggtaagcgtgttgactactcaggacgttctgttatagttgttggaccagaacttaaattttatcaatgtggacttccaaagaagatggcattagaattattcaagccatttgttatggataaattagttaaagaaggttatgcacataatataaaaagtgcgaaatctatagtagaaaaagttaagccagaagtttgggatgttttagaagatgttataaaaagtcatccagttcttcttaaccgtgcaccgactctacatagattaggtatacaagcatttgaaccaatcttagttgaaggtaaggctataaaactacatcctcttgtatgtacagcttataatgcagactttgatggtgaccaaatggcagtccatgtacctttatcagtagaagcacaagcagaagcaagattcttaatgctttctgtaaataatatacttgctcctaaagatggttcacctataactactccatctcaggatatggttttaggttgctattatctaacaatagaagcccaagatggagctaaaggaacaggtatggtatttaaagactttaatgaactattacttgcttattacaataaatcagttcatctacatgcattagtgaaactgaaggtaacacttgaagatggaagaagttcattggttgaaagtactgttggtagatttatatttaatgaaaatatacctcaagacttaggttttgtagatagaaaagaaaatccatttgcacttgaagttgatttcttagcagataaaaaatctcttggtaaaataatagataaatgctttagaaaacacggaaatacagaaacagctgaattactagattatataaaagctctaggatttaaatattctacattaggtggtataacagttgctgttgatgatatgagtgtcccagaagaaaagaaagtatttatagctgaggcagaagctaaagttgataagtatgaaaaagcatacagaagaggtctaatctctgatgaagaaagatatgaaaaagttatagagacatggacagaaacaactgataaagttactgatgctcttatgggtggactagatagattaaataatatatatataatggcacattcaggagccagaggttctaaaaaccaaattagacagctggcaggtatgcgtggtcttatggcaaatgcatctggtaaaacagtcgagataccagttaaatctaatttccgtgaaggtttatcagtactagaatactttacatcttcacatggtgccagaaaaggtcttgccgatacagctatacgtacagctgaatctggatatttaacaagaagacttgttgatgtaagtcaagatgttattgtaagggaaatagattgtggaacagaagatactacagagatttatgctataaaagaaggaaatgaagttatagaagagatatatgatagaattgtaggaagatatactatagaccctatattaaatcctgaaactggagaagttctagttgaggctgattcaatgatacaagaagatgaagcagaaactatagtagctttagggattgaaaaaattaggataagaacagttcttaactgtaaaactaatcatggagtttgttctaagtgttatggtagaaacttggcaacaggaaaagaagttaatataggtgaagcagttggtataatagcagctcaatctatcggtgagccgggtactcagcttacaatgcgtacattccatactggaggagttgcaggagctgatataactcaaggtctaccaagggttgaagaattatttgaagctagaaaaccaaaaggattagctgtaataactgaagtatctggtagagttgaaattgatgaaacaggaaagagaaaagaagtaaatgtaataccagaagaaggcgagactcaaacatatgtaattccatatggttctagattaaaagttaagcaaggtcaaatgctagaggctggagaccctctaacacaaggatttataaatcctcatgatatagtaagagtaaatggtgttaagggagttcaagaatatatagttaaagaagttcaaagagtgtatagacttcaaggggttgatgttaatgataagcatatagaagttatagtaagacaaatgctatctaaagtaaaagttgaagacccaggagatacagatttattgccaggtggatatgaagatgtattaacattcaatgaatgtaataaagatgctatagataaaggtctaagaccagcagttgctaaaagagttttacttggtataactaaagcatctcttgcaactgattcattcttatcagcagcttctttccaagaaacaacaagagtattaacagaggcagcaataaaaggtaaagaagaccacttaataggacttaaagaaaatgttatattaggtaagttaataccagcaggaacaggaatgaagaaatatagaaatatagctgttgaaaaaattgaagattaatagcatatagagtaaagaaatcttgacaaccattatttgtggtgttaaaatagtaaagtgtgttgtttaaaagtacactaagggcttgaacaagttcttagtgacttttagatggcaataaatgagaactaaaaagcatcaagctagaaaagtgctaatatcacatatttatgtgttatagacattaaattgtaagtaacgaatgttacaatcagtcagtatgaatattcatattgatgtagttggcggtcactgataagatcgaaaatttggaaggaggtgcagatgatgccaacaattaaccaattagttcgtaaaagtagaaaagcgctagagaagaaatctactgctccagcattacaaaaaggttacaactctttaaataagaaagtaactgacgctagtgccccacaaaaaagaggggtttgtacttcagtaaaaacagttactcctaagaagcctaactcagctttaagaaaagttgccagagttagattaactaatggtatagaagtttctgcttatataccaggagaaggacacaacttacaagagcatagtgttgttcttataagaggaggaagagtaaaagaccttccaggggttagataccatatactaagaggtactctagatacagcaggtgttgataagagaagacaatcaagatctaaatacggtgcgaagagacctaaagaagctaaaaaataaaacaattaatgattgattatagttcggtgctttaaatatatatatatttacggcatcacggcattaaatgatttatgtcgagtacctatgatttaagttaaataattaaggagggaagcgaaatgccaagaaaaggtaatattccaaaaagagaagttttaccagatcctatgtatgggagtaaggtagttactaaattaataaataatctaatggtagacggaaaaaaaggaaagtctcaaagaatagtttatgatgctttcgcaattgttgctgaaaagacaggagaagaagctttagaagtatttaataaagcaatggataatataatgcctgttttagaagtaaaagcaagaagagttggtggggcaaattaccaagtgccaatcgaagttagacctgaaagaagacaaacattaggtttaagatggctagtaaaatatactagagctcgtggagaaaaaggaatggttgaaaagctagctaaagagataatggacgcagctaacaacactggagcttcagttaagaaaaaagaagatactcataaaatggcagaagctaataaagcatttgctcattacagatggtaggatatatagatatcttataaattcaaggatatcataaggaggataaccatggctagaaagtttcctttggaaaaaactaggaatataggaatcatggctcatatagatgcaggaaagactactactacagaaagaatcctgttttatactgggcaaactcataaaataggagaaactcatgaaggagcttctcaaatggactggatggagcaagaaaaggaaagaggtataacaataacttctgccgctactactgcttcatggaaagaccatagaataaacataatagatactcctggacacgtggacttcacagttgaggttgaaagatctctaagagttcttgatggttcagttgctgtattctgtgcaaaaggtggggttgagcctcaatctgaaaatgtatggagacaagctgaaacttatggagtacctagaatagcttttataaacaaaatggatatattaggtgcagatttctacaatgttataagcatgatgaaatctagattaaattctaatgcagttcctatgcaattaccaataggtaaagaagattcatttataggtataatagacttattaaaaatggatgctgttatatacaaagacgacctaggggttgaaatggaagaaacagatataccagaagatatgaaagaattagctgctgagtggagagaaaaattagttgaatcagtagctgaaactgatgaagaattaatgatgaaataccttgaaggtgaagaacttactatagatgaattaaaagttgctataagaaaagctactatagcttgtgaaatgaacccagttttctgtggtacagcttatagaaacaaaggtgttcagttagtaatagatgcagttttagattacttaccagcaccaactgatataccagctataaaaggtatattagcagatggagaagaagctgaaagacattcttctgatgaagagccattctctgcattagcattcaaaataatgactgacccattcgttggaaaactagcgttcttcagagtttattctggaacattagaatcaggttcttatgttttaaatgcaactaagaataagagagaaagaattggtcgtatattacaaatgcatgctaatacaagagaagaaataactaaagtgtatgctggagatatagcagcagcagtaggattaaaagatactactactggagacacattatgtgaccctgctaatccaataatacttgaatctatggaattccctgagccagttatatctgttgctatagaaccaagttctaaagcagctcaagaaaaaatgggtatagctcttcaaaaattagctgaagaagacccaactttcacagttaagactgaccaagaaacaggacaaactataatatctggtatgggtgaattacacttagagataatagtagatagattattaagagaatttaaagtagaagctaaagttggtgcaccacaagttgcatatagagagactataactcaaccagttgatgttgaatacaagtactctaagcaatcaggtggtagaggacaatacggtcacgttaagattagagttgctcctcaagagccaggtgaaggatacaagttcacaaacaaaactgttggtggatcagtaccaaaagaatatgttggtccagttgacatgggtatacaaggagctatgcaatctggtatagttgctggatatccagttgtagacgttgctgttgagttatatgatggttcttaccatgaggttgactcttctgagatggcgtttaagatggctggttcaatggcattcaaagatgctatgaagaaaggtaatgcagttcttttagagccttacttcaaagtagaagttgttactccagaagattacatgggagatgttatgggtgacttaaactcaagaagaggattaatccaaggtatggaagctagaagtggtgcacaagttataaatgcattcgttccactttcagaaatgtttggatactcaacagacctaagatcttcaactcaaggtcgtgcaacttacacaatgatattcgatcactatgagcaagttccagcttcagttgctaagaaaatagctgaaggaaaataatttaaaaataattaataatataaatataaaaaataatcagctagatgagatatatctcatctagcacaagataaagggaggaaattcaaaatggctaaagctaaatacgaaagaacaaaacctcatgttaatatagggacaataggacacgtagaccacggtaaaactacattaacagcagcaataacaaaaacattatatgacagatatcaattaggagaagcagtagatttcgcaaacatagataaagctccagaagaaagagaaagaggaatcacaatatcaacagcacacgttgagtatgaaacaccaaatagacactatgcacacgttgactgcccaggacatgctgactacgttaagaacatgataacaggagcagcacaaatggacggagcaatattagtttgttcagcaacagatggaccaatgccacaaacaagagagcatatactattatcaagacaagttggagtaccatatatagtagtattcttaaacaaatgtgacatggtagatgatgaagagttattagagttagtagagatggaagtaagagatttattaacagaatatgatttcccaggagatgacactccaatagtaagaggttcagcattaatggcattagaagatccaaagagcgagtggggagataagatagtagaattattcgagcaaatagatgagtatataccagctccagagagagatacagataagccattcttaatgccagtagaggatgtattctcaatcacaggaagaggaacagttgcaacaggaagagtggaaagaggagtactaaaagtacaagacgaagtagaattagtaggattaacagaagcaccaagaaaagtagtagtaacaggagtagagatgttcagaaaattattagaccaagcacaagcaggggataatataggagcattattaagaggagtacaaagaaacgagatagaaagaggacaagtactagcaaagactggatcagtaaaggcacacacaaagtttacagcagaagtatatgtacttaaaaaagaagagggtggaagacatacaccattctttgatggatatagaccacaattctatttcagaacaacagacgtaacaggagcttgtaagttaccagaaggaatagagatggtaatgcctggagataacgtaacaatggaagtagacttaataaactcaatagttgtagaagagggattaagattctcaataagagaaggtggaagaacagtagcttcaggagttgttgctacaataatagagtaattctttactaaactaatggatttaatataaaaaaaagaggggggtaactcctctcttttttgttttttgttgacaagtagcgctaaagcatatatactaaactagtgccttgagacagattaacaatcaagtttaaggttatgatgttgtaatagaaaataaaattgaaaaaaacagaaaaaaaacttgaaaaaatgtaacagatgatataaaatataatagtgtgcttgagagattaagaaaataataattaaatcctagtgaaatacgaactgatatcgatttaaaagttacaacacacccggagcagtgtatcggtattggttgtacgcaacttgaaaattaaacacgtgataaaggagggaaaacaaaatggctaagaatgaaaaaataagaataagattaaaatcatatgatcacaaattattagatttttcagcaggtaaaatagttgaaactgctaaaaaggctggatcacaagtttcaggacctgtgcctctaccaacagaaaaacaagttgtaactatattaagagctgtacataagtacaaagactctagagaacaatttgaaataagaactcataaaagactaatcgacatagctaatccaacacctaagacagttgactcattaatgagattagacttaccagcaggtgtagatatagaaataaaattataagaacccctaagatattatcctatagatgattatcttagaatgattactctaaaagatgtaatccgctgtaagaattataggaggtgctaatatgaaaggaatattaggcaaaaaagttggtatgactcaaatattcactgataaaggtgtagttatacctgtaacagctgttgaagcagggcctatggtcgttactcaaataaaaacagttgataaagatggatacaatgctatacaaataggttttgaagatgctaaagaaaaagctttaaacaaacctaaaaaaggacatttagctgctgctaatgttttaaagaaacatttaaaagaatttagagtagattctgtagaaggatacacagtaggacaagaaataaaagctgatgtatttgaagcaggtgcaaaaatagatgttactggaataagtaaaggtaagggattccaaggtccaataaaaagacatggacaaagtagaggtcctgaaactcatggttctagataccacagaagaccaggttcaatgggagcttgttcttacccaggtagagtatttaaaaacaaaaaattagctggacatatgggaagcgtaaaggtaacagttcaaaacttagaggttgttaaagtagatgctgacaagaaccttatattagttaaaggagctataccaggagctaaaggttcagtagtaactataaaagaagctataaaggtttctaaataatgactaacctagagaaaggaggaataacaatgccaaaattaaatgtactaaatgttagtggacaaaacgttggagaaatagaattatcagattctatatttggcgtagaagttaatggacatgttttatacgaagttgtaaaaaatcaattagcaaataagagacaaggaactcaatctgctaaaactagagcagaagttagaggtggcggaagaaaaccttggaaacaaaaaggaacaggtagagcaagacaaggttctacaagatctgtacaatgggtaggtggaggagttgcttttgcacctaaaccaagaagctacaaatatacattacctaagaaggtaagaagattagctatgaagagtgctttatcttcaaaagttcaaaatagtgaagttatagtattagatgcattaaacatggatgctcctaagactaaagaatttgctcaaatattaaacaatataaatgctgctaaaaaagctttagtagttatagctgacaaaaacgataacgtaataaaatcagctagaaatatagaaggtgttcaaactgcattagttaatactatgaatgtatatgatatattaaaatacgattcatttataataactacagatgctgttaaaaaagtggaggaggtgtacgcataatgactaatccacatgatgtaataataagaccagttgtaactgagcacagtatggctgaaatgggtgaaaaaaaatacacttttgttgtggctaaagatgcgaacaaaactgaaataaaaaaagcagtagaaaaagtattcggagttagtgttgataaagtaaatactttaaactacgatggaaaagttaaaagaatgggtagaactcaaggaagaacagcaagctttaagaaagcagtagttaaattaactgctgatagtaaagaaatagaattcttccaaggaatgtagtattataacaaacgaaggagggaaaacagatggctataaaaaagtttagaccaacttctcctgccttaagacaaatgacagttttagtttctgatgaaataacatgtaatcaaccagaaaaatctcttttagttaacttaaagaaaaatgctggtagaaacgtacatggtagaataactgttcgtcatagaggtggaggacaaaaaagaaaatatagaataatagattttaaaagagataaagatggtatacctgctaaggttgctactatagaatatgatccaaacagaactgcaaatatcgcattattaaactatgctgatggagaaaaaagatatatattagctccagttggaattaacgttggagatactatattatcaggattaggtgctgatataaaaccaggaaactgtttagcattaaaagatatgccagttggtactatcattcataatatagaattaaagccaggaaaaggagctcaattagttagatctgctggagtttctgcacaattaatggctaaagaaggaaaaaatgctttattaagattaccatcaggtgagatgagattagtaagcataaactgtaaagctactataggtcaagttggaaatatagagcatggtaacgtagttatcggtaaagcaggtagaaaaagacatatgggaataagacctactgtaagaggttctgtaatgaaccctaatgaccatccacacggtggaggggaaggtagatctccaataggtagaccatctcctgttactccatggggtaaaccagctcttggatacaaaactagaaagaaaaataaagcttcaaataaactaatagtatcaagaagaactaagtagtaaatttatttttgctcggaaaggaggaatataaatgtcaagatcaactaaaaaagggccttttgtccatgcaagacttttaaagaagatagaagctatgaatgctagtggaaataaagaagttataaaaacttggtcaagatcttcaactgtatttccacaaatggtagaaaacactatagctgttcatgatggaagaaaacatgttccagtatatataacagaagatatggttggacataaattaggtgagttcgttcctactagaactttcaaaggacataaggatgacgaaaaatctaataagagaaaataattaaattatgactaagaaaggaggaataacaatggaagcaaaagctactgctaaatacgtacgtgtatcaccaagaaaagcaggccaaatatgtgaccttgttagaggaaagaatgttgatgaagcattagcaatattaaagtttactccaagaggagcagcttcaataatagctaaggttgtaaaatcagctaaagctaacgcagaaaacaatcacgaaatggatactgaaaaattatatatagcatcaatagttgctaatcaaggaccaacaatgaagagattcatgcctagagctatgggtcgtgcaactacaataagaaaaagaacttctcatatagaggttgttgttaaagaaaaaaaataattaatagataggagggaaagtaatgggtcaaaaggttaatccacacggcttaagggtcggtgttataaaagattgggactcaagatggttcgctactgataaaaaagagttcggaaacttattattagaagaccataatatacgtaaattcttaaagaaaagattatactcagctggagttgctaagatagaaatagaaagatcagctaacaaaataaaaatggacttacacgttgctaagcctggtgtagttataggaagagctggtgcaggaatcgaagcattaaaagctgaattagaaaaaatgacaaagaaaactataatagttaatatagtagaagtaagaagtacagataaaaatgctcaattagtagctgaaaatatagctttagctatagagagaagggttgctttcagaagagcaatgaaacaagctatacaaagagcaatgaaatctggtgctaaagggataaaagtttctgcttcaggaagattaggtggagctgaaatggctagaactgaaggttatagtgaaggaaatgtgccactacaaactttaagagcagatatagattatggtttcgctgaagctgatacaacttatggaaaaatcggtataaaagtttggatatgtaatggtgaagttttaccaactagagacggtgtaaatccaagagaagaaagcagaaagagcgatagaagagacaacaagagagataatagaagaaacgatagaagaggaaatgacagaagaggaaatgataacagaggaaactacagaggacaaagacctcaaggtggatcaagacctcaaagaactgaaaacaaaggaaattaataatagttaggttcaaggaaggaggaaaaatactcatgttaatgccaaaaagagtaaagcgtcgtagagttcatagaggaagcatggctgggcaagctcataagggtaataaagttacttatggtgagtttggattagtagcattagaagcttcttggataacttctaatcaaatagaagctgccagaatcgcgatgactagatatataaaaagagggggaaaggtttggataaaaatattccctcataaaccagtaacaagaaaaccagcagagactcgtatgggtgcagggaaaggttctccagaatattgggtagctgtagttaagccaggaagagttatgtttgaattagcaggtgtttctgaagataaagcaagagaagctatgagacttgctgcacataaattaccaatcaaatgtaaatttgttaaaaaagaagatttagaagtaaagggtggtgaataggatgaaagctaaagaattaagagatttaacaagcgaagagctaatgaacaaattaaacgacttcaaaagtgaattatttagcttaagattccaattagctactggtcaattagaaaatacagctagaataaagtttgttaagaaggatatagcaaaagttaaaactgttcttgctgaaagaaagttatacgaaactagagcttaatttggaaaggaggctttttaaacatggaaagaggaagaagaaaagttagaataggccgtgttgttagtgataagatggataaaacaatagtagtagctgttgaagaattcgtacgtcatccactatataataaacgtgttaagagaactaagaaattcaaggctcatgatgaaaagaatatatgtaacatcggagatagagttaaaataatggaaactagaccattatctaaagataagagattcagactagttgaagttgttgagaaagttaagtagtttttgaagaaggagggattacgatatgatacaacaagaatcacgtctaagagttgctgataactcaggagctaaagaacttttatgtatacgtgttctaggcggaagtaaaagaagatatggtaacataggcgacgttatagttgctactgttaaaagtgcaacacctggtggagttgtaaaaaaaggtaaggttgttaaagctgttatagtaagaagcaaacaaggcgtaagacgtaatgacggaagctatatatcttttgatgaaaatgctgctgttataataaaggacgataaaactccagtaggaactcgtatattcgggcctgttgctagagagttaagagacaatgaattcatgaaaatagtttctcttgctccagaagtactataattaaggaggtgcaataggacatgatgcgtgttaaaaaaggtgacactgttgtagttatagcaggtaaagataaaggtaaaaaaggttcagttttaaaggtatatcctaaaactagcaaagtgttagttgaaggtgtaaatgtaataactaaacatcaaaaaccaagtgctatgaaccaacaaggtggaataataaataaagaagccccaatacacatatctaatgtaatgccatttgatcctgaaacaggaaaaggcgttagagtaagatatgaagtaaaagatgggaacaaagtaagagtatcagcaaagagcggaaaagaattataataaatattgcttgaaaggagggaccttaaatggcttctagattacaagaaaaatacatgaaagaagttgctcctgctttaatggagaaatttggatacaaaaacgtaatggagatacctaagttaaataaaatagttattaacatgggtataggtgacgctagagaaaatccaaaaggattagaaaaaggcgttgaagaattagaaatgatatcaggacaaaagcctgttataactaaagctagaaaatctgttgctaacttcaaattaagagaaggaatgccaataggaacaaaagttacattaagagctgacaaaatgttctactttatggacaaattagtttcagtttctttaccaagagttagagattttagaggagttaaccctaatgcttttgatggtagaggaaattatgctttaggagttaaagaacaattaatattccctgaaatagaatatgataaaatagataaagtaagaggaatggatataatatttgttactacagcaaaaactgacgaagaagctcgtgaattattaaaattattaggaatgccattttctaagtaagcaaaggagggattcccgtggctagaaaagcgatggttgttaagcaacaaagaaagcaaaagtacgctactagagaatacactagatgtactatatgcggaagaccgcattcagttttgaaaaaatttggtatatgccgtatatgctttagagaattagcttataaaggtcaaatacctggtgttagaaaagcaagctggtagaagcttgattagaatggaaggagggcaacaaaatgacaatgacagatccaattgcagatatgcttactcgtataagaaatgctaatgttgttaagcatgaaactgtagatgttccagcttctaatatgaagaaagaattagctagaatcttattagaagaaggtttcataagaggttatgatgttatagaagatggaaaacaaggtatcataagaatacaattaaagtacggacaagaaggcgaaagagttataacaggtcttaagaaaatatctaagcctggaatgagagtttacgctgctaaccatgagataccaaaagtattaaacggattaggaatatcagttatatctacttcaaaaggaatattaactgacaagcaagctagaaaagaaaatgttggtggagaagtaatctgctacgtttggtaattaatatgaacaatgtaaggaggtgcgaccatgtcaagaataggtgttaagccaataataataccagcaggtgttgaagttactatagctgaaggaaatttagttacagtaaaaggtccaaaaggaactttaactaaacaattaagtgctgagttaaacataaaaaaagaagaaaatacaataatggttgaaagaccaactgataataaaaaacatagatctttacacggactaactagaactttattagataatatggttgtaggtgtaaatactggtttcgaaaagaaattagaattaaaaggtgttggatatagagctcaaaaacaaggaaagaaattagttatgaacttaggtttctctcatccagttgagatggaagatccagaaggaataactgttgaagctccaaaccaaacagagttaatagtaaaaggtatagacaagcaattagtagggaattatgctgctaagataagagcttggagaaagccagagccatacaaaggtaaaggtataaaatacgttgatgaagtaatcagacgtaaagaaggaaaaactggtaaaaaataataccaaaacttaaacgctagaaaggagtgagctaggtgttaaaaaaggctgataaaaatgctaatagacttcaaagacataagagagttcgtagaaaaataagcggtacttctcaaagaccaagattatgtgtatttagaagtgctaacaatatatatgctcaaataatagatgacacaaaaagagtaactctagttgctgcatcttctttagaagcagaagttaagagtgctgtcaatcatacaggaaacaaggaagcagctaagaaagttggagaattagttgctaaaaaagctgttgaaaaaggaatcactgaagttgtatttgacagaggtggatacttatatcatggaagaattcaagaattagctgaaggtgctagagaagctggtcttaagttctaatacgaaggagggaaaaatacatgctacgtcgtaagccgatagatgcaggacaacttgacttacaagaaaaagttgttgaagtaagacgtgttactaaggttgtaaaaggtggtagaaatttcagatttgcagcattagtagttgttggagatgaaaacggacacgttggtataggtgctgggaaagcaatggaagtaccagacgctataaaaaaagcagttgaagatgctaagaaaaatctaatagtagtgccaatagttgggactacaattcctcacgaagtacgcggacactttggtgctggaaatatattaataatgcctgctgtagaaggtacaggagtaatagctgggggacctgctagagccgtacttgagctagctggactaaaagacgttagagctaaatctttagggtctaacaatccaagaaatatggtaaatgctacaatagaaggacttaattctctaaaaacagttgaagatatagctaaacttagaggtaaaaaagttgaagaacttctagggtaaggaggtagtgtaaaatggctaaattacaaataaagttagttagaagtgttataggaactactcctaaccaaaaaaagaatgttgaagcgttaggattaagaaaaagagaacaagttgttgtaaaagaagacaatgctcaaacaagaggtatgataaataaagtaagtcacttattagaagtaactgaaatagctgaataatttttataaagtagtgcaaggaggtgcaatccatgaagttacatgagttaaaacctgctgaaggtgcagtaagagctaagagaagattaggtagaggtactgcaactggacaaggtaaaactgcaggacgtggacaaaaaggtcaatggtctcgttctggtggtggagtaagagtaggatttgaaggtggacaaatgccactagctagaagacttcctaagagaggtttcaataacatatttaagaaagtttacacagaagttaatgttgaagttttaaacagatttgaaaatggaacagaaataactgcagaattattaaaatctactaaaactataagcaaaataggtaaagacggaattaaaatcttaggtgaaggtaatttagagaaagctttaactgttaaagctgctaaatttacagcttcagctcaagaaaaaatagaaaaagctggtggaaaagcagagttagtataataacctgctaatctcctagccagtacaggcggggtgaattagcgtgctgtcaaaattaaaacaagcttggaagattaaagcagtaagaaaaaaagtaatgtatacacttatgatgatcgtgatattcagaataggtactactataccagttccaggcatagacactagtattatacaaaagatggtaggcggcaatagtctactttctctgtataatatgtttactggtggagcatttagtaacttttcactatttgctttaggtataagtccatatatcactgcatcaatcataatacaacttctaacagtaggttttgaaagtttagcagaacttcaaaaatctggtgaagaaggaaagaaaaaaatcaataagtacactaaatatacagcactagctctagcagttgtacaagctttgggaattacattaggaattgtaagaagtgctttaatatcaaatagtgtgttttttatcacaactgttgtaataacattagtttcagcaagtatgttagtaatgtggattggggacaaaattactgaaaaaggaatcggtaatggtagttcagtaataatatttgcaggtataatatcaagaatacctacagatgttattaaaatatcgcaacaagttaaatctggcgaagttgcaccttgggttatagtgattctagctgtagttatattacttacagtaacaggagttacatttatacaagaagcaactagaaagatacctgtacaatatgctaaaagagttgttggaagaaaaatgtatggaggacaaagttctcatataccaatgaaagttaaccagtcaggagttatgcctataatttttgctagttcacttttagctttccctcaaacaatagctatgtttatgggtccaaatgctcaggcttttgttcaaaaatacttaagtatggcaacagaacaaggattttggacatatagatcaattgagattctacttataattttcttctcatatttttatacaactgtatcatttaatacagaagacatatctaaaaatatgaaaaataatggtggatttataccaggtataagaccaggtgagcctactatggattatttaaatagaattttaactagattaactttagctggagctactttcttagcaataattgctatggtgccagctcttacaacacattatatgaaagtaaatatgagtctagctgggacttcattgctaatcgttgttggagttgctttggagcttaagagacagttagagtcaaacttagttatgagaagctatcaaggtttcttaaaataaaatggagatggataatatgagaataatattacttggacctccaggtgctggtaaaggtactcaggcggcaggaatagtagaaaaatacaatatacctcatatatcaacaggagatatattcagaaagaatataaaagagggaacagaacttggaaaaaaagctaaagaatacatggaccaaggtttattagtaccagatgagttaactgtaggtttagttactgatagaatatctcaagaagattgtaaaaatggatttatgttagatggatttccaagaaatgtagcacaaggagaacatttagatatcttcttaaaaaatgctggtatatcactagataaagttgtcaatattgaagttgataagagtatattagtgtctagagcagttggtagaagaatatgtaagtcttgtggagctacttaccatgttgagtttaatcctcctaaagtagaaggtgtatgtgatgtatgccaaggagaattatatcaaagagctgatgataatgaagaaactgtatctaagagaatacaagtttatctagatgaaactaagcctttagtagattattatagcaaacaaggtataatagcagatataaaaggtgatcaagcaatagataaagtatttgaagatattgtcgcagccttaggaagtggaaaataaatgattatcttgaaatcaaaaaaagaaatagaacttttaagagaagcaggtaaaatagttgctgacactcatgaagttttaagaaaagctatttctccgggaatatctactttagaattagataaaatagctgaagagaatataagaaaatacaatgcagagccttcttttaaaggatatggaggttttccaggaagtatatgtgcttctatcaatagagaggtagtacatggtattccaggagaaactatattacaagaaggtgacattgtaagtttggatataggagcctattataaaggatatcatggtgattctgcgaaaactcacggagtaggcatgatatctgaagaagataggaaattgatagaagtaactagagaaagcttctatgaaggaataaaatttgctaaattaggatatagactttcagatatctcacacgcagtacaaacacacgttgagaaacatggtttctcggtagttagagatttagtgggtcatggagttggagcaaatcttcatgaagacccacaagtacctaattatggactcccaggaaaaggaccaagacttagagaaggaatggttattgctatagagccaatggttaatgcaggtcgttatcatgtaaagactctatcagatgggtggacgactgttacaatagatggaaaaaaatcagctcattatgagcatacgatagcaattactgaacatgaacctttgatattgacaaagttgtaatttaaaaagtaggtgaaaaaagtgctatcagataatttaagtataggtcaagttgttaaagtttcattaggacgagataaaggaaatttattctttgtagtcaaaataattaataatgaatatgtattaatagctgatggaaaaaagagaaaacttgacaaacctaagttaaagaaagtgaagcacttaaaaaaatataattttattaatgatgaagttagaaaaagagtagtatctggacaagagattacagattcttttttaagagctgaacttactaagttaaattagataatttaacttattgaaatggagggctggttagttaatggccaaaaaagatgttatagaattagaaggtacagtttcagaagctttacctaatgctatgttcaaagttaaactagaaaatggacatgagatattatgccacatttctggaaagctaagaatgaacttcataagaattcttgaaggtgacaaggtgaatgttgaactttctccatatgaccttacaagaggaagaattacttggcgtaagaagtagactatattaatatttagtctaaggagggattaataatgaaggttagaccatcagtaaaaccaatatgtgaaaaatgtaaagtaataaaaagaaaaggaaaagtaatggttatctgtgaaaatccaaagcataagcaaaagcaaggataagaaattattactagcattttgttaaattttatagtataatactatattgtgatgttaacaaaagaacgttaaaatcgttgaacaatctggcgtaggattggcatatgatgtgaagttttaaacactaaaaactatgtgtaggaggtgcgatcatggcaagaatagctggggtagatttacctagagaaaaaagagcggagataggcttaacttatatatatggtataggtaaagcaactgctaacgaaatattagctaaggctgagataaatccagatactagaataaaagatttatcagaagatcaagttaatgagttaagaaaagttatagatgacgatttcttagttgaaggtgacttaagaagagaaattgctttaaacataaagagattaagagatataaaatgttatagaggaataagacacgctaaaggtcttccattaagaggacaaagaactaagactaatgctagaactagaaaaggtcctagaaaaacagtatctcgtaaaaagaaaaaataaataaataataactagatgaaggagggaaaaggaaaatggctaaaccaaaaaagaaagttacacgtattagaagaagagaacgtaaaaatatagaacgtggtcatgctcatatacaatcaactttcaataatacaataataactttaactgacgttcacggaaatgctatatcttgggcaagttctggacaattaggattcaaaggatcaagaaaatcaactccatttgcatctcaaatggctgctgaaacagctgcaaaagctgcgatggaacacggactaaaaagtgttgaggtattcgtaaaggggccaggttcaggaagagaagctgcaataagagctttacaagcaactggactagaagtaactatgataaaagacgttactccaatcccacataacggatgcagaccaccaaagagaagaagagtgtaattaataagagtacaataggaggtgtagataaatggcaagatatacaggtgcatcatgtagacaatgccgtagagagggaatgaaattattccttaaaggtgatagatgttatacagacaaatgtgctatagtaaaaagaaactatgctccaggtcaacatggccaaggaagaaagaaagtttctaactatggattacaattaagagaaaaacaaaaagttaaaagaatatatggagttttagagactcaatttagaaatttatatgaacgtgctgaaaatatgcctggtaaagcaggtgagaacttattaagtttattagagagaagattagataatgtagtttacagaatgggactagcatcttctagaaaagaagctagacaattagtgactcatggtcatttcactttaaatggaaataaagtagacataccttcattaatagttaaggttggagatgttatagaagttaaagagaaatcaagatcttctgcaaaattcaaaaatttagtagaagttaactcaagaatagctcctaagtggttagaagctaatgtagaaggaatgacagcaaaagtagttggtgttccaacaagagaagatatagatcttgagatagcagagcacttaatcatagaactttactctaaataataagcacacttttaaaaattattttaaaattttgtttaccctcagtggattactgaattttaaggagggttttgtccatgatagaaatagaaaagccaaaagtagatatagttgagcttagcgaagactatagatatggtaagtttgttatagagcctctagaaagaggatatggaataactataggtaacgcattaagaagaatattattatcatcattaccaggtgtagcagtgaatgctataaaaatagatggagttcttcatgaattttcaacaatacctggtgttaaagaagatgttactgagataatattaactttaaaagagctttcagcaactatagatggtgaaggaagtagaacacttaaaatagaagctcaaggaccatgctctatcacaggtgcagatataatctgtcctccagatgttgaaatattaagtaaagatttagcaatagctacattagatgataatgctaaacttaatatggagatatttgtagataaaggtagaggttatgtttctgctgaagaaaataaaacagagaatgttccaataggtgttttacctgtggattcaatatatactcctgttgagaaggttagttatcatgtggaaaacacaagagttggtcaaaaaacagattatgataaattagtactagaagtttggactaatggtagtataaatcctcaagagggaatatcattagctgcaaaggtattagttgagcatttaaacttatttatagacttaactgaacatgtaagtagtgttgaaatcatggtagaaaaagaagaagatcaaaaagaaaaagttcttgaaatgactatagaagaattagatttatcagttagatcatataactgtttaaagagagcgggaattaatacagttgaagaattagctaataaatctgaggatgatatgatgaaggttagaaacctaggtaagaagtcattagaagaggtaatacaaaaactagaagaacttggattgggattaaaaccaagtgaagaatagcgagcaaaggagggataagaatggctaagtaccgtaaattaggacgtgaaacagctcacagaaaccttatgttaagaaacttagtaacttgcttactaagaagtggaagaatagaaactacagtgactagagcgaaagaaactcgtagaatggctgaaaagatgataactcttgctaagagaggagatcttcatgctagaagacaagttttagcttatgttatggatgaaacagtagttaataacttattcacagatttagctccaaaatatgctgagagaaatggtggatacactagaataataaaaatagggccaagaaaaggcgatgctgctgaaatggcttttatagaattagtatagtaaggaaaggattaggcttgatggcttaatcttttttttatttttttgactaaggtatgatataataatgtgtaaaatgatttttataagttattgcttactaaaaggagtatgagttaatggataatatagtaaaggtaaataatatttcgtttgagtatattacagatgaagcaaaacttaaagcaatagataatttaagcctagatgttaaaaaaggagaatttgttgcgataataggacataatggttctggtaagtctactttatctaaaaacttaaatgctattcttatgcctactgaaggaaatattcttattgatgatatggatactaaagaagaagaaagattatgggatataagacaaactgcaggcatggtatttcaaaatccagataatcaaatagttgctactatagtagaagaagacgttgcatttggacctgagaacttaggtatagaaccaaaagaaataagacgaattgtagaggagtctttaaaaagtgtaggtatgtatgatttaagagatagacagcctcatttgttatcaggaggtcaaaagcaaagagttgcaatagcaggaattattgctatgaggcctaaatgtataatatttgatgaagcaacagcaatgttagatccatctggaagaaaagaagttatgaaaacaataaaaagacttaataaggaagaaaatataactgttatacatataacgcactttatggaagaagcagtagaagctgatagagttgtagttatggaaaaaggaaagaaaatcttagagggaactcctagagaagtattcagtaaaataaagatgttaaaggaaatcggtttagatgtaccttgtatgacagagttatctagtttattaatagaagaaggtataaatattagtagtgatatattaactgtggatgagatggtgatggaattatgtcaattatagtaaagaatttaacacatatatataatgaagggatgccttttgcaagtaaggcacttgatgatatttcttttgagattaaagatagagattttgttggtcttataggtcatacaggctcaggaaaatctacattaatacaacatttaaatggattactaaagccttcctcaggagaaatatttataaatgattttaatataacagataaaaacttgaatttaactgagattagaaaaagagtaggggttgtatttcaatatccagaataccaattgtttgaagaaacgattgataaagatatagcttttggaccctctaatttaggcttagaggagtctgagatacataacagggtaaaagcatcaatggaagctgtaggacttgattatgagggatttaaagacaaatctccttttgaattatctgggggacaaaagcgtagagtagcaattgctggagttatagccatgaacccagaagttctcatattggatgaaccaactgctggtcttgaccctggtggaagagatgaaatttttaacttaataaaagacttacatgaaaaaaagaatatgactataatactatcatcacatagtatggatgatatggcaaagttagcaaaaactttaattgttatgaatcatggtagcgtagaatttatgggaactcctagagaagtgtttaaatcaaatgctagtaaattaaaagatataggattagatattccacaagttttagagcttgcattgaaattgagagaaaaaggctttgacatcagtgaggatatattgactttagaagaagcaaaacaggaaatattaaaagttgtgagaggacgaggattatgttaaaagatataactatagggcaatactacccaacaagttctgctattcataaattagatccaaggataaagcttgtagcgacaattgtatttatggtatctatatttgtagtaaataaattttggccttatatagtagttttattatgtttattagctatgataaaattggctaatataccagtcaaatatattgttaagggtgttaaacctcttaaatggattattttgtttacatttcttataaatatttttttcttaccaggtgatgaaatatggtcatttggatttttagctattacaaaacagggtctaagacaagcaatttttatggcaataagattaatatttttagtagttggtacatcattgcttactttaacaacttcaccaatagaattaactgatggaatagagagattgttgaatccatttaagaaaattggtttgccagttcatgaacttgcaatgatgatgacaattgctttacgttttattcctacattgttagatgagacagacaaaataatgaaggctcagatgtctagaggtgcagattttgaaagtaagaatcttataaatagagcaaagaatttagtaccacttttggtacctttatttgtaagtgcatttagaagagctgatgaattggctatggccatggaggccagatgttacagaggtggacataataggactaagatgagagagtctgttatatcaagaagggattatatggcatgtgtatttcaggttgtttatctgggagcaattatagctactagatttatagcaatttaattaataagttatagatataatgaggtaaagtatgagaaatataaaaattaaaatccaatacaatggtaagaattattgtggatggcaaaagcaacctgattctttagggatacaaggtacaattgaaagggctatatatgatataacaaaagaagaaaccagtcttatagggtctggtagaactgattcaggagttcatgctattggtcagattgcaaattttaaaattaattcaggtataagtatagaaagtataccaatggcactaaatgccaagttgccaaaagacatatcagttatagaagcatgtgaagtaaatgatgattttcactccagatacagtgcaaaaggtaaaacatataaatatttagtatataatagcaagtttagaaatccaatacttagtgagatatcatatcaagtaaaatatgaacttgattttgataaaatgtgttcagaagcaaaaagtttattaggaacacatgattttaaaggttttatgagttctggttcatctgtaaaagatacagttagaacgatatatgatattgatataagtaaaaaagatgacttgattacttttgagattagtggtaatggttttttatataacatggtgaggattattgttggaacacttgttgatatgggtcgtggcagaattaacgaaccatttttagatataatacaatcaaaaactaggtcaagatgtggacatacagctccagcacaaggattatttctcaaaaaagttcattattaacttgacacaccaggctacatgtattaaaatatatgagaatgtgttaataagtccacttgccccggacttgacataaacggtaaaaaaattttatgaaaagtagttaaggagggacagttatgaaaagttatatagctaagccagctgatgtacaaagaaaatggtacttagttgatgctgaaggaaaaacattaggtcgtttagcaacagaaattgcgacagtattgagaggtaaacataaaccaacatttactcctcacgttgatggtggagattttgttgttgtagtaaatgcagaaaaaatagttttaagtggtaagaaattagatcaaaaatattacagataccatactggttatgtaggtggattaaaagaaatatcttacagagatatgatggataagaaaccagaagaagttatatcacatgctgtaagcggtatgttacctaaaaataaattaagaagcagaatgatgactagattaagagtatttgcaggtgctgagcacactcatgcagctcaaaatccagaagttttaaactttaaataagattaataggtgaaaggaggagtttataatggctaacgttcaatattatggaactggaagaagaaaaagttctgttgctagagtaagactagttgcaggtgaaggaaatatattagtaaatggaagagcattagaaaattattttaattatgagacattaataagagatgttaaacaaccattagttttaactggtaatgaaaataaatatgatgttatagtaaaagttgaaggtggaggattcactggacaagctggagctataagacatggaatatctagagctttattaaaagctgatttagatttaagacctgctttaaagaaagaaggtttcttaactagagatgcaagaatgaaggaaagaaagaaatacggattaaaagcagcaagaagagctccacaattctcaaaaagataattacttatttttttggaaaagcaaaatcctttatttactgttattcagaaagtattggtattttaaaaatgttgggttaagttaattattgatatataataaaataataagatatcttattaggatgtttttcattaagaagaacatcctttttattttgactatttaataaaaaacatatgctaataacatttaaattttatttttataatattgtaatttaaaagtttatataaggttatatattttaagatattatttaacaatataaattctgaatatacgttatcaaagtttataatataaactaagtataatttattgtatagtattgaatgttagataaacatagtgaattaaataggggcagaaatataatatcattacataataatatattaataccaataaataaagatatatcaatattaaaaaaatttaaatgtttgtactaatatatggaatattatagtgtttttataagtatacatatacagggtgatgttgtgagaaagtacataaaacatataatttttagttttgcaatgatatgtctagtagtagtatccatatttgaaattaaaaatatttctgaagatgttatcaagtatatgccagtaacaaacaaaactataattttagatgctggtcatggaggcattgatccaggtgcattaaataaggataagagtacatctgaaaaggatattaacctagcaataacacttaagcttagagagcttatagaatcaagtggtggccttgtaatattaactcgagaagatgacagtagcctttataaagaagaaaataataaaactacaagacaaaaatataatgagaatttgaaaaatagaaaagaaataatatctaattctaatgccaatatgtttgtctctatacatcttaatgcatttgaacaatcaaaatactatggagctcaaactttttatcctaaagacaaacaagacagtaaagaattatcgaagtgtattcaagaagaacttaaaagagtagtagataagacaaacaacagagaagtcaaaccaagggatgatatatatcttttgaaagaaaataatattccatcagtactgatagaatgtggttttttatcaaatgaaaaagagtgtaaactcttaactgatgaaacatatcaagaaaaaatagcatgggcaatctacataggaatacaaaaatatttaagttgaaataagtataaaaataggtctaaatatgtaaatagcttgtattaaagcagttaaaatgcattaatataggctatttttattttgacaaaaaaatatttaaaataaaagttaaaaagttgttgacttagaataatatagatgatattatatatgagtgcccaaaaggagcaccaaaataagacaaaagaactttgaaaattaaacagtaggttaatttataaacaagaaacaaaccataaagccagatattttgataacaatagtatctgagcctgataaacttttatttgagagtttgatcctggctcaggatgaacgctggcggcgtgcctaacacatgcaagttgagcgatttacttcggtaaagagcggcggacgggtgagtaacgcgtgggtaacctaccctgtacacacggataacataccgaaaggtatgctaatacgggataatatatttgagaggcatctcttgaatatcaaaggtgagccagtacaggatggacccgcgtctgattagctagttggtaaggtaacggcttaccaaggcgacgatcagtagccgacctgagagggtgatcggccacattggaactgagacacggtccaaactcctacgggaggcagcagtggggaatattgcacaatgggcgaaagcctgatgcagcaacgccgcgtgagtgatgaaggccttcgggtcgtaaaactctgtcctcaaggaagataatgacggtacttgaggaggaagccccggctaactacgtgccagcagccgcggtaatacgtagggggctagcgttatccggatttactgggcgtaaagggtgcgtaggcggtctttcaagtcaggagtgaaaggctacggctcaaccgtagtaagctcttgaaactgggagacttgagtgcaggagaggagagtggaattcctagtgtagcggtgaaatgcgtagatattaggaggaacaccagttgcgaaggcggctctctggactgtaactgacgctgaggcacgaaagcgtggggagcaaacaggattagataccctggtagtccacgctgtaaacgatgagtactaggtgtcgggggttacccccttcggtgccgcagctaacgcattaagtactccgcctgggaagtacgctcgcaagagtgaaactcaaaggaattgacggggacccgcacaagtagcggagcatgtggtttaattcgaagcaacgcgaagaaccttacctaagcttgacatcccaatgacatctccttaatcggagagttcccttcggggacattggtgacaggtggtgcatggttgtcgtcagctcgtgtcgtgagatgttgggttaagtcccgcaacgagcgcaacccttgtctttagttgccatcattaagttgggcactctagagagactgccagggataacctggaggaaggtggggatgacgtcaaatcatcatgccccttatgcttagggctacacacgtgctacaatgggtagtacagagggttgccaagccgtaaggtggagctaatcccttaaagctactctcagttcggattgtaggctgaaactcgcctacatgaagctggagttactagtaatcgcagatcagaatgctgcggtgaatgcgttcccgggtcttgtacacaccgcccgtcacaccacgggagttggagacgcccgaagccgattatctaaccttttggaagaagtcgtcgaaggtggaatcaataactggggtgaagtcgtaacaaggtagccgtatcggaaggtgcggctggatcacctcctttctaaggagaattgcctactgtttaattttgaaagttctttacgaactttatatatgggggtgtagctcagttgggagagcacttgccttgcaagcaaggggtcaggagttcgactctcctcatctccaccatttaagagtatattacttaaatctttgatttacttagtagcctcttacaatgcacttatagcttaaatttatacaagctttgtgcgttagcactttaagcaacgggatttattcgttggcgacgtgctttagcactttgaaaactgcatatatatttagtgatatgacatctaatttgtaatatataaagctgataactttttaaaattatcgaagttgatagcttctaatctatcaaacctttttaactggtcaagttattaagggtgcagggcggatgccttggcactaggagccgatgaaggacgtgataagctgcgataagcttcggggagttgcacgtaaactttgatccgaagatttccgaatgaggaaactcacttagagtaatgtctaagtatcattaagtgaatacatagcttaatgaggggaactcagggaactgaaacatctaagtacctgaaggaagagaaagaaattcgattccgtaagtagcggcgagcgaacgcggattagcccaaaccaataaagttttctttattggggttgcggacatatcataacgaagaggtatcgtaattgaagaggtttggaaagacccaccacagaaggtaatagtcctgtatgttaaacgagaagacttcagatatgatccagagtaccacgggacacgtgaaaccctgtgggaagcaggagggaccaccctccaaggctaaatactacctagtgaccgatagcgtatagtaccgtgagggaaaggtgaaaagaaccccgggaggggagtgaaatagaacctgaaaccctgcacttacaagctgtggaagcacatttcttgtgtgaccgcgtactttttgtagaacgggccaacgagttacgttaagtagcaaggttaagcacttaaggtgcggagccgtagcgaaagcgagttttaactgagcgttcagttacttgacgtagacccgaaaccgggcgacctacccatgagcaggatgaagcgaaagtaaaatttcgtggaggtccgaacccacgagcgttgaaaagctcggggatgacttgtgggtagcggtgaaattccaatcgagcccggagatagctggttctccccgaaatagctttagggctagcctcaaggtgagagatacggaggtagagcactgaatgtcctagggggtattgcacctaccgaagactatcaaactccgaatgccgtcatcttatacttgggagtcagactgtgggtgataagattcatagtcgaaagggcaacagcccagatcgtcagctaaggtccctaaatgtaagttaagtggtaaaggatgtgggattgcacagacaaccaggatgttggcttagaagcagccactcattcaaagagtgcgtaatagctcactggtcgagtgatcctgcgccgaagatttccggggctaaaacttactaccgaagctacggcatcagtaatgatgggtaggggagcttcccatacgggttgaagcatgaccgtaaggacatgtggacagtatgggagtgagaatgttggcatgagtagcgagatgtgggtgagaatcccacaggccgtaaacccaaggtttccaggggaaggttcgtccgccctgggttagtcgggacctaagctgaggccgaaaggcgtaggtgatggacaacaggttgatattcctgtactaccgataaccgtttgagagaagggatgacacagtaggataagctaagcacactgttggttatgtgtgcccaagcattgaggcagtcaaagtaggcaaatccgctttgataatgctgggatgtgatggggagcgaaatttagtagcgaagtagctgatttcacactgtcaagaaaagtctctatcgaggttaaaggtacccgtaccgcaaaccgacacaggtgggtgaggagagtatcctaaggccagcgagagaactgttgttaaggaactcggcaaaatgaccccgtaacttagggataaggggtgccaccatcaggtggccgcagagaataggcccaagcgactgtttaccaaaaacataggtttctgctaagtcgcaagacgatgtataggagctgacgcctgcccggtgctggaaggttaaggggatctgttagagcaatcgaagcagtgaacttaagccccagtaaacggcggccgtaactataacggtcctaaggtagcgaaattccttgtcgggtaagttccgacccgcacgaaaggcgtaacgatttgggcactgtctcaacaacagactcggtgaaattgtaattccggtgaagatgccggatacctgcgacaggacggaaagaccccatggagctttactgtagcttgacattgggtcttggtactacatgtacaggataggtgggaggctttgaaaccaggacgccagttttggcggagccatccttgggataccacccttgtagtactgggactctaaccataggccatgaatctggtcttgggacactgtcaggtgggcagtttgactggggcggtcgcctcccaaaaggtaacggaggcgctcaaaggttctctcagtacggtcggaaatcgtacgtagagtgtaaaggcaaaagagagcttgattgcaagacatacaggtcgagcaaggatgaaaatcggacttagtgatccggtggttctgcgtggaagggccatcgctcaacggataaaagctaccctggggataacaggcttatctcccccaagagtccacatcgacggggaggtttggcacctcgatgtcggctcatcacatcctggggctgtagtaggtcccaagggttgggctgttcgcccattaaagtggtacgcgagctgggttcagaacgtcgtgagacagttcggtccctatccgtcgcaggcgtaggaaatttgagaagacctgtccttagtacgagaggaccgggatggacgtacctctggtgtaccagttgtcctgccaagggcatggctgggtagctatgtacggaatggataagcgctgaaagcatctaagcgcgaagccaacttcaagataagatttcccaccgcaagggtaagaccccagaaagactatctggttgataggtcgaaggtgtaagtgcagtaatgtatttagcttatcgatactaataggtcgaggacttgaccaatattatttgatgttattcattaagatatatgtgcagtttttagagtgttaactctaaaaaaaaataaaaaaagtattgacaaaaatagtaaaaaatgttaatattatacttgtcctagcaacaagaaaaaaatgtggttataatagcagagaagatacacctgtttccattccgaacacagaagttaagttctctagcgctgatggtacttggtgggaaactgcctgggagagtagggcatagccacgtgaatgttccaaggtagctcaacggtggagcaaccggctgttaaccggtaggctgtgggttcgagccccacccttggagccattatggctcgttggtcaagaggttaagacaccgccctttcacggcggtaacaggggttcaattcccctacgagtcaccatttgtgggatcatagctcagctgggagagcacctgccttacaagcagggggtcacaggttcgagccctgttggtcccaccatttgcggcctggtagttcagttggttagaatgccagcctgtcacgctggaggtcgagggttcgagccccttccaggtcgccaaaataaaaatgctggtgtggctcaacggtagagcagctgacttgtaatcagcaggttgtaggttcgattcctatcaccagctccatgtaaaactaatacggaggatttcccgagcggccaaagggggcagactgtaaatctgttgtcatcgacttcggtggttcgaatccaccatcctccaccaattaaatatgcgggtgtagctcaatggtagagttctggccttccaagccagctgtgagggttcgatccccttcacccgctccaaagaaagcgtgggtgcatagctcagctggatagagcaacgcccttctaaggcgtgtgtccggggttcgaatccctgtgcgctcaccacatatatattggggattagccaagtcggtaaggcacatgactttgactcatgtatgcgtaggttcgagtcctgcatccccagccaaataaaaatatggtctattagctcagtcggtagagcacctgacttttaatcagggtgtcccgcgttcgagtcgcggatagatcaccaatggagaggtgtccgagtggtttaaggagctggtcttgaaaaccagtgacttcgaaaggggccgtgggttcgaatcccaccctctccgccaaaaaaatgactgaatttggagaagtactcaagtggctcaagaggatcccctgctaagggattaggctgggtaaccggtgcgagggttcgaatccctccttctccgccattcaaaaacgaggtgtagcgcagtttggtagcgcacatggtttgggaccatggggccgggggttcgagtcccttcacctcgaccaacttaagcttttagttcagttggttagagtgcccaactcatggctagtaattctagggtttgagtccatgaaggttattcttcataggggtgtagctcagttggtagagcgtcggtctccaaaaccgtgcgccgggggttcgagtccctccacccctgccaaataaaaaggacttgaaaaaagttggattttagagtagtataagatagtaaataagatttcgaggtgtagcgcagtttggtagcgcacatggtttgggaccatggggccgggggttcgagtcccttcacctcgaccaagaaaagggcctatagctcaggtggttagagcgcacgcctgataagcgtgaggtcgctggttcgagtccagctaggcccaccatttgcccagatagctcagtcggtagagcaggggactgaaaatccccgtgtcggtggttcgattccgcctctgggcaccaggaatacggcggtatagcttagttggctagagcgttcggttcatacccgaaaggtcataggttcgactcctattaccgctaccatctaactatatcaataaagaactttgaaaattaaacagtaggttaatttataaaacaagaaacaaaccataaagccagatattttgataacaatagtatctgagcctgataaacttttatttgagagtttgatcctggctcaggatgaacgctggcggcgtgcctaacacatgcaagttgagcgatttacttcggtaaagagcggcggacgggtgagtaacgcgtgggtaacctaccctgtacacacggataacataccgaaaggtatgctaatacgggataatatatttgagaggcatctcttgaatatcaaaggtgagccagtacaggatggacccgcgtctgattagctagttggtaaggtaacggcttaccaaggcgacgatcagtagccgacctgagagggtgatcggccacattggaactgagacacggtccaaactcctacgggaggcagcagtggggaatattgcacaatgggcgaaagcctgatgcagcaacgccgcgtgagtgatgaaggccttcgggtcgtaaaactctgtcctcaaggaagataatgacggtacttgaggaggaagccccggctaactacgtgccagcagccgcggtaatacgtagggggctagcgttatccggatttactgggcgtaaagggtgcgtaggcggtctttcaagtcaggagtgaaaggctacggctcaaccgtagtaagctcttgaaactgggagacttgagtgcaggagaggagagtggaattcctagtgtagcggtgaaatgcgtagatattaggaggaacaccagttgcgaaggcggctctctggactgtaactgacgctgaggcacgaaagcgtggggagcaaacaggattagataccctggtagtccacgctgtaaacgatgagtactaggtgtcgggggttacccccttcggtgccgcagctaacgcattaagtactccgcctgggaagtacgctcgcaagagtgaaactcaaaggaattgacggggacccgcacaagtagcggagcatgtggtttaattcgaagcaacgcgaagaaccttacctaagcttgacatcccaatgacatctccttaatcggagagttcccttcggggacattggtgacaggtggtgcatggttgtcgtcagctcgtgtcgtgagatgttgggttaagtcccgcaacgagcgcaacccttgtctttagttgccatcattaagttgggcactctagagagactgccagggataacctggaggaaggtggggatgacgtcaaatcatcatgccccttatgcttagggctacacacgtgctacaatgggtagtacagagggttgccaagccgtaaggtggagctaatcccttaaagctactctcagttcggattgtaggctgaaactcgcctacatgaagctggagttactagtaatcgcagatcagaatgctgcggtgaatgcgttcccgggtcttgtacacaccgcccgtcacaccacgggagttggagacgcccgaagccgattatctaaccttttggaagaagtcgtcgaaggtggaatcaataactggggtgaagtcgtaacaaggtagccgtatcggaaggtgcggctggatcacctcctttctaaggagaattgcctactgtttaattttgaaagttctttacgaactttatatatgggggtgtagctcagttgggagagcacttgccttgcaagcaaggggtcaggagttcgactctcctcatctccaccatttaagagtatattacttaaatctttgatttacttagtagcctcttacaatgcacttatagcttaaatttatacaagctttgtgcgttagcactttaagcaacagaataaactgaacgtatgtgaagtttgtttgttggcgctgtgctttagcactttgaaaactgcatatatatatttagtgatatgacatctaatttgtaatatataaagctgataactttttaaaattatcgaagttgatagcttctaatctatcaaacctttttaactggtcaagttattaagggtgcagggcggatgccttggcactaggagccgatgaaggacgtgataagctgcgataagcttcggggagttgcacgtaaactttgatccgaagatttccgaatgaggaaactcacttagagtaatgtctaagtatcattaagtgaatacatagcttaatgaggggaactcagggaactgaaacatctaagtacctgaaggaagagaaagaaattcgattccgtaagtagcggcgagcgaacgcggattagcccaaaccaataaagttttctttattggggttgcggacatatcataacgaagaggtatcgtaattgaagaggtttggaaagacccaccacagaaggtaatagtcctgtatgttaaacgagaagacttcagatatgatccagagtaccacgggacacgtgaaaccctgtgggaagcaggagggaccaccctccaaggctaaatactacctagtgaccgatagcgtatagtaccgtgagggaaaggtgaaaagaaccccgggaggggagtgaaatagaacctgaaaccctgcacttacaagctgtggaagcacatttcttgtgtgaccgcgtactttttgtagaacgggccaacgagttacgttaagtagcaaggttaagcacttaaggtgcggagccgtagcgaaagcgagttttaactgagcgttcagttacttgacgtagacccgaaaccgggcgacctacccatgagcaggatgaagcgaaagtaaaatttcgtggaggtccgaacccacgagcgttgaaaagctcggggatgacttgtgggtagcggtgaaattccaatcgagcccggagatagctggttctccccgaaatagctttagggctagcctcaaggtgagagatacggaggtagagcactgaatgtcctagggggtattgcacctaccgaagactatcaaactccgaatgccgtcatcttatacttgggagtcagactgtgggtgataagattcatagtcgaaagggcaacagcccagatcgtcagctaaggtccctaaatgtaagttaagtggtaaaggatgtgggattgcacagacaaccaggatgttggcttagaagcagccactcattcaaagagtgcgtaatagctcactggtcgagtgatcctgcgccgaagatttccggggctaaaacttactaccgaagctacggcatcagtaatgatgggtaggggagcttcccatacgggttgaagcatgaccgtaaggacatgtggacagtatgggagtgagaatgttggcatgagtagcgagatgtgggtgagaatcccacaggccgtaaacccaaggtttccaggggaaggttcgtccgccctgggttagtcgggacctaagctgaggccgaaaggcgtaggtgatggacaacaggttgatattcctgtactaccgataaccgtttgagagaagggatgacacagtaggataagctaagcacactgttggttatgtgtgcccaagcattgaggcagtcaaagtaggcaaatccgctttgataatgctgggatgtgatggggagcgaaatttagtagcgaagtagctgatttcacactgtcaagaaaagtctctatcgaggttaaaggtacccgtaccgcaaaccgacacaggtgggtgaggagagtatcctaaggccagcgagagaactgttgttaaggaactcggcaaaatgaccccgtaacttagggataaggggtgccaccatcaggtggccgcagagaataggcccaagcgactgtttaccaaaaacataggtttctgctaagtcgcaagacgatgtataggagctgacgcctgcccggtgctggaaggttaaggggatctgttagagcaatcgaagcagtgaacttaagccccagtaaacggcggccgtaactataacggtcctaaggtagcgaaattccttgtcgggtaagttccgacccgcacgaaaggcgtaacgatttgggcactgtctcaacaacagactcggtgaaattgtaattccggtgaagatgccggatacctgcgacaggacggaaagaccccatggagctttactgtagcttgacattgggtcttggtactacatgtacaggataggtgggaggctttgaaaccaggacgccagttttggcggagccatccttgggataccacccttgtagtactgggactctaaccataggccatgaatctggtcttgggacactgtcaggtgggcagtttgactggggcggtcgcctcccaaaaggtaacggaggcgctcaaaggttctctcagtacggtcggaaatcgtacgtagagtgtaaaggcaaaagagagcttgattgcaagacatacaggtcgagcaaggatgaaaatcggacttagtgatccggtggttctgcgtggaagggccatcgctcaacggataaaagctaccctggggataacaggcttatctcccccaagagtccacatcgacggggaggtttggcacctcgatgtcggctcatcacatcctggggctgtagtaggtcccaagggttgggctgttcgcccattaaagtggtacgcgagctgggttcagaacgtcgtgagacagttcggtccctatccgtcgcaggcgtaggaaatttgagaagacctgtccttagtacgagaggaccgggatggacgtacctctggtgtaccagttgtcctgccaagggcatggctgggtagctatgtacggaatggataagcgctgaaagcatctaagcgcgaagccaacttcaagataagatttcccaccgcaagggtaagactccagaaagactatctggttgataggtcgaaggtgtaagtgcagcaatgtatttagcttatcgatactaataggtcgaggacttgaccaatatttatttgatgttcattcattaagatatatgtgtagtttttagagtgctaactctaaagaaactagtattactaggttctataaacttattaaaaacttaatagaaatattaagcataaagattatgtggttacaatagcagagaggatacacctgttcccattccgaacacagaagttaagctctctagcgctgatggtacttggtgggaaactgcctgggagagtaggacgtagccacgtaatttttttgttataataaatttagaatttaacttatatagtttaatttgataatttgatgaaaaaaataaaagacttactgatttttaaatctataggtcttttattttttatctaacatttaaattaagttgttgaatatatcttatattacttactttatatattaattaccattaatacattatatctaattactattcatctaaattattatgccattattttatatacaaattcttttaatttgtctaatccagataaaaaagtattttcactgcaagcataggatatacgaatatatttatccataccaaatgctatgccaggaacaactgcaacattatattcttctaaaaattgattacaaaattctatagaaaaactatctttatattcaaatttctcagatactttagaaagatctataaatatatagaatgcgccatttggattcacatatcctacattatcaatagagtctagttttgatttaattaaatctcttcttgatttatatgttttaaccatattgtctatgtcaattgagcaatctttcaaggctccataggctatgtattgtgctgttagacttgggtgagatataagatgtccttgtatagaactcattgctttagcaatcgttttattagatgcagtatatcctaatcttaatccagtcattgcagctgacttagaaaaaccatttatagttattgttatatctttagcttcttcgcttaatgatgcaattgatgtaaattcaccagtgtagcatattttttcatatatttcatctgctaaaatatatattttattttgtatgcatacatctactatttctattaattcatcttttgtataaacactaccagtaggatttgaaggattgtttattacaagaatttttgttttatctgttatagatttttcaagttcttcttttgttaacttaaatccattttcttttttagtatcaataaaaactggaacagcattaactaacttaatcatttcaggataactaacccaataaggctttggtaataagacttcatctccttcgtctgttaaagctagtaaagtatttgttattgagttttttgctccacttgatacaactatttcgtctattgaatagttacagttattttcttcaataagttttttacagatttcctctctaagtatttttaatcctggaactaaatcatatttagtgtaatctttatttaaagaatcaataccataagattttgcgttattaggtacattaaaatcgggttctcctatactaagatttattactttaactccattactttccatttctttaactttagaactaatacctattgtgtaggatggtgttataaagtttagtctttttgataacataaaatgcctccttttaaattattatttatattatacgacaaatttaaagaatttacataaggaaatttgtagatatatacattaatatatataatagcctacactttttgcctaaaattagtgtaaaaaaaagagaaaaaaattttaactttcaaagttgttagaaacgctactgttcaaaatatccacatagtatttgcaatgatttgcgcaagtttgactattatgtacaaatttggtaatcttaatatagcaattattaagataatccctttaacttagttgaaggggatttttttagacttaacatactacatatagtggtattgggattaataaaatacaatatatagtaacaggaggtttttttaattggttgaattcgtaaaaaaaagagatggaagagtaattccatttaatgaagatagaataacaagagctatatttttagcagcaacgaatgttgcagaaagagaaggaatagtacctgattataaattatctgagcaattaactcaagaagtaataaagtttttaaatcataaatactcagaatcagttccaagtgttgaagatatacaagattctgtagttaaggttcttatagaaactggccatgcaaaaactagtgaagaatatataatatacagaactgaaagaagtagaataagaaattcaaaaacaagattgatgaaggcaatagaggaaattacctttgaagatgcagaagatgctgatataaaaagagaaaatgcaaatattaatggtaatacagcaatgggaactatgttacaatatggaagcactgtatctaaagaattttgtaaaacacatatattaaaaccagaacattcttttgctcatgataatggagatatacacatacatgatatggattttttaaatatgggaacattaacttgttgtcaaatagatgttaaaaaactattcaatggtggattttcaacaggacatggctttttaagagagccacaagatataataagttatggtgcattagctgcaattgctatacaaagcaatcaaaacgatcaacatggaggtcaaagtataccatttttcgattatggattggctgaaggtgtatataagacatttaagaaattctacataggaaatttagctaaagcattgaagttatttaaaggaattgaaaataatgatgtgataaagaacatagtatataatacagagaaagaaacaaatcaaaaagttggtcttaagagagatgaattgtatctaaacttagaaaaagagaaattaatacagacttttgatatagatgatgaacttgtaaataagatgcaaaactttgcatttgaagaatcgtatagagaaactgataaaaaaacatatcaatctatggaagcatttatacacaatctaaatacaatgcactctagagcaggtgcacaggtaccattttcaagtgtaaacttcggaacagatacttctgaagaaggaagaatggtaactaagaatcttctattatctcaagaaagaggtttaggtaatggagagacaccaatttttccaattttaatatttaaggtcaaagaaggcataaatttaaatcctgaagaccctaattatgatttatttaaattatcatgcagagtatcagctaaaagactatttcctaattttagttttttagatgcgccttttaatgcaaaatattataaaaaaggtgaaccagatacagaggctacatatatgggttgtagaacaagagtacttagtaatgtgtgtggttcagaaacagttagtggtagaggaaacatatcttttactacagtaaatttaccaagattgggtataaaacatggtattataaataatgaaaaggctaatttagatggtttctttgaagaattagatgagaagataaacttaattatagaacaattattggagcgctttgaggttcaaggaaataaaaagatgaagaattttccattcttaatggggcaaggtgtatggaaaggttctgatgatttagtaccagaagatacactaaaagaagtaataaaacaaggaacattgacaattggatttataggtttagcagagtgccttattgctcttataggtaaacatcatggagaaagtaaagaagctcaagaattaggattaaaaatagtgtcacatatgagacataaaatggatgaagcaacggacaaatataaattaaatttctccttaatgggtactccagcagaaggtctttcaggtaggtttactaaaatagataaaaaagtttatggagaaattaaaggtatcacagataaagaatattatactaattcattccatgtaccagtttattacaatataagtgcatatgataaaattgagatagaagctccataccatgaattgactaatgcaggtcatataacatatgtagagttagatggagatccatctgataatttagaggcttttgaaactgttataaaagctatgaaagatttgggtataggatatggaagtataaatcatcctgtagatagagacccaatatgcggtttttcaggtgtaataacaagtaatatatgccctgtatgtggaagaaatgaagatgaaagtgacatcaaattcgaaagaataagaagaataacaggatacttagttggtacagttgatagatttaataatgctaaaaaagcagaagtaagagatagagtaaaacatagatagttttatttgggggaataagttatgaaaataagaatgtcatctactataagttatgacagcatagttgatggaccaggattaagaatggtaatatggactcaaggatgtattcataattgtaaagagtgccataatcctcagacacatgatttatgtggaggattttatatggatacagaagaaattataaataaagtcaaatcattgaaattacaaaaaggcattacgctatcaggaggagaaccatttttacaaccagaaccattagaagaaatagcaagagaagctaaaataaatgggttagatgtatggtcatatactggatttacgtttgaacaactgttagataaaaaaaatagagcgtattttaaaaatttaaatttactaaagcaaattgatattttagtggatggaaaatttatagctgaaaaaaaagatataagcttaaagtttagagggtcatcaaatcaaaggataattgatgttcaaaaaagtttgaaatataaaaaagtgtttttggttgagcaatatatgaaggatgatttatctatagcagaataaaatataaataaacaggattaaatatatgcatatatttaatcctgtttattttcatataatatttcaagtttgtataatgtaacaattaaaccaaaagactcattgtatatttgaaattaagttttttatagtttataggtgttttatgtggattacgaatgatatagtatcgatacattatttaatcgattcttattccaagaaacaattaatttatagaaattcttaattgttacaatataaatatctagataagttataagatactgataaataatttataaagtttattaatctaatattgtgtgtgaatgttaagtggtcaagtagtctaaaaaatgaaaaagatttaaaaaagtgttttaactaaacacataagtgttaaattcatgtataagtataggttagatacataagaaataattatgtaatatctatctttgtaaaaaaatattaaattttgtaatttgtggataaatatgtttataatgtggataatatttaatgtaataagttaaagcaatatgaatcaactgtttataatgtggataatattataaatgtatgaataattgcagtatttaaaaacaaaaaaagttaaaaaagttgttgactctaaaagaaaaagttggtatagtaatacttgtcctcaagaaaagggcaaacaaataaagcataaagaactttgaaaattaaacagtaggttaatttataaaacaagaaacaaaccataaagccagatattttgataacaatagtatctgagcctgataaacttttatttgagagtttgatcctggctcaggatgaacgctggcggcgtgcctaacacatgcaagttgagcgatttacttcggtaaagagcggcggacgggtgagtaacgcgtgggtaacctaccctgtacacacggataacataccgaaaggtatgctaatacgggataatatatttgagaggcatctcttgaatatcaaaggtgagccagtacaggatggacccgcgtctgattagctagttggtaaggtaacggcttaccaaggcgacgatcagtagccgacctgagagggtgatcggccacattggaactgagacacggtccaaactcctacgggaggcagcagtggggaatattgcacaatgggcgaaagcctgatgcagcaacgccgcgtgagtgatgaaggccttcgggtcgtaaaactctgtcctcaaggaagataatgacggtacttgaggaggaagccccggctaactacgtgccagcagccgcggtaatacgtagggggctagcgttatccggatttactgggcgtaaagggtgcgtaggcggtctttcaagtcaggagtgaaaggctacggctcaaccgtagtaagctcttgaaactgggagacttgagtgcaggagaggagagtggaattcctagtgtagcggtgaaatgcgtagatattaggaggaacaccagttgcgaaggcggctctctggactgtaactgacgctgaggcacgaaagcgtggggagcaaacaggattagataccctggtagtccacgctgtaaacgatgagtactaggtgtcgggggttacccccttcggtgccgcagctaacgcattaagtactccgcctgggaagtacgctcgcaagagtgaaactcaaaggaattgacggggacccgcacaagtagcggagcatgtggtttaattcgaagcaacgcgaagaaccttacctaagcttgacatcccaatgacatctccttaatcggagagttcccttcggggacattggtgacaggtggtgcatggttgtcgtcagctcgtgtcgtgagatgttgggttaagtcccgcaacgagcgcaacccttgtctttagttgccatcattaagttgggcactctagagagactgccagggataacctggaggaaggtggggatgacgtcaaatcatcatgccccttatgcttagggctacacacgtgctacaatgggtagtacagagggttgccaagccgtaaggtggagctaatcccttaaagctactctcagttcggattgtaggctgaaactcgcctacatgaagctggagttactagtaatcgcagatcagaatgctgcggtgaatgcgttcccgggtcttgtacacaccgcccgtcacaccacgggagttggagacgcccgaagccgattatctaaccttttggaagaagtcgtcgaaggtggaatcaataactggggtgaagtcgtaacaaggtagccgtatcggaaggtgcggctggatcacctcctttctaaggagaattgcctactgtttaattttgaaagttctttacgaactttatatatgggggtgtagctcagttgggagagcacttgccttgcaagcaaggggtcaggagttcgactctcctcatctccaccatttaagagtatattacttaaatctttgatttacttagtagcctcttacaatgcacttatagcttaaatttatacaagctttgtgcgttagcactttaagcaacagaataaactgaacgtatgtgaagtttgtttgttggcgctgtgctttagcactttgaaaactgcatatatatatttagtgatatgacatctaatttgtaatatataaagctgataactttttaaaattatcgaagttgatagcttctaatctatcaaacctttttaactggtcaagttattaagggtgcagggcggatgccttggcactaggagccgatgaaggacgtgataagctgcgataagcttcggggagttgcacgtaaactttgatccgaagatttccgaatgaggaaactcacttagagtaatgtctaagtatcattaagtgaatacatagcttaatgaggggaactcagggaactgaaacatctaagtacctgaaggaagagaaagaaattcgattccgtaagtagcggcgagcgaacgcggattagcccaaaccaataaagttttctttattggggttgcggacatatcataacgaagaggtatcgtaattgaagaggtttggaaagacccaccacagaaggtaatagtcctgtatgttaaacgagaagacttcagatatgatccagagtaccacgggacacgtgaaaccctgtgggaagcaggagggaccaccctccaaggctaaatactacctagtgaccgatagcgtatagtaccgtgagggaaaggtgaaaagaaccccgggaggggagtgaaatagaacctgaaaccctgcacttacaagctgtggaagcacatttcttgtgtgaccgcgtactttttgtagaacgggccaacgagttacgttaagtagcaaggttaagcacttaaggtgcggagccgtagcgaaagcgagttttaactgagcgttcagttacttgacgtagacccgaaaccgggcgacctacccatgagcaggatgaagcgaaagtaaaatttcgtggaggtccgaacccacgagcgttgaaaagctcggggatgacttgtgggtagcggtgaaattccaatcgagcccggagatagctggttctccccgaaatagctttagggctagcctcaaggtgagagatacggaggtagagcactgaatgtcctagggggtattgcacctaccgaagactatcaaactccgaatgccgtcatcttatacttgggagtcagactgtgggtgataagattcatagtcgaaagggcaacagcccagatcgtcagctaaggtccctaaatgtaagttaagtggtaaaggatgtgggattgcacagacaaccaggatgttggcttagaagcagccactcattcaaagagtgcgtaatagctcactggtcgagtgatcctgcgccgaagatttccggggctaaaacttactaccgaagctacggcatcagtaatgatgggtaggggagcttcccatacgggttgaagcatgaccgtaaggacatgtggacagtatgggagtgagaatgttggcatgagtagcgagatgtgggtgagaatcccacaggccgtaaacccaaggtttccaggggaaggttcgtccgccctgggttagtcgggacctaagctgaggccgaaaggcgtaggtgatggacaacaggttgatattcctgtactaccgataaccgtttgagagaagggatgacacagtaggataagctaagcacactgttggttatgtgtgcccaagcattgaggcagtcaaagtaggcaaatccgctttgataatgctgggatgtgatggggagcgaaatttagtagcgaagtagctgatttcacactgtcaagaaaagtctctatcgaggttaaaggtacccgtaccgcaaaccgacacaggtgggtgaggagagtatcctaaggccagcgagagaactgttgttaaggaactcggcaaaatgaccccgtaacttagggataaggggtgccaccatcaggtggccgcagagaataggcccaagcgactgtttaccaaaaacataggtttctgctaagtcgcaagacgatgtataggagctgacgcctgcccggtgctggaaggttaaggggatctgttagagcaatcgaagcagtgaacttaagccccagtaaacggcggccgtaactataacggtcctaaggtagcgaaattccttgtcgggtaagttccgacccgcacgaaaggcgtaacgatttgggcactgtctcaacaacagactcggtgaaattgtaattccggtgaagatgccggatacctgcgacaggacggaaagaccccatggagctttactgtagcttgacattgggtcttggtactacatgtacaggataggtgggaggctttgaaaccaggacgccagttttggcggagccatccttgggataccacccttgtagtactgggactctaaccataggccatgaatctggtcttgggacactgtcaggtgggcagtttgactggggcggtcgcctcccaaaaggtaacggaggcgctcaaaggttctctcagtacggtcggaaatcgtacgtagagtgtaaaggcaaaagagagcttgattgcaagacatacaggtcgagcaaggatgaaaatcggacttagtgatccggtggttctgcgtggaagggccatcgctcaacggataaaagctaccctggggataacaggcttatctcccccaagagtccacatcgacggggaggtttggcacctcgatgtcggctcatcacatcctggggctgtagtaggtcccaagggttgggctgttcgcccattaaagtggtacgcgagctgggttcagaacgtcgtgagacagttcggtccctatccgtcgcaggcgtaggaaatttgagaagacctgtccttagtacgagaggaccgggatggacgtacctctggtgtaccagttgtcctgccaagggcatggctgggtagctatgtacggaatggataagcgctgaaagcatctaagcgcgaagccaacttcaagataagatttcccaccgcaagggtaagaccccagaaagactatctggttgataggtcgaaggtgtaagtgcagcaatgtatttagcttatcgatactaataggtcgaggacttgaccaatattatttgatgtcattcattaagatatatgtgcagtttttagagtgctaaatctatatttttaaacttgtcaaaacttatggatttttaatagttttataaggcaaaaaatcgaataaaaaaagtattgacacaataagacaaagatgttattataatacttgtcttagaaaaaaagttaaatgaaaatttagacaataatctggttataatagcagagaggatacacctgttcccattccgaacacagaagttaagctctctagcgctgatggtacttggtgggaaactgcctgggagagtaggacatagccaggtgatgtgccgaagtggcggaactggcagacgcacaggacttaaaatcctgcgggacttacctctcgtaccggttcgattccggtcttcggcaccacaaattattgtgggccattagctcagttggttagagcgcccggctcataaccggtaggtctggggttcgagtccctgatggcccaccacaataatttaaagaactttgaaaattaaacagtaggttaatttataaacaagaaacaaaccataaagccagatattttgataacaatagtatctgagcctgataaacttttatttgagagtttgatcctggctcaggatgaacgctggcggcgtgcctaacacatgcaagttgagcgatttacttcggtaaagagcggcggacgggtgagtaacgcgtgggtaacctaccctgtacacacggataacataccgaaaggtatgctaatacgggataatatatttgagaggcatctcttgaatatcaaaggtgagccagtacaggatggacccgcgtctgattagctagttggtaaggtaacggcttaccaaggcgacgatcagtagccgacctgagagggtgatcggccacattggaactgagacacggtccaaactcctacgggaggcagcagtggggaatattgcacaatgggcgaaagcctgatgcagcaacgccgcgtgagtgatgaaggccttcgggtcgtaaaactctgtcctcaaggaagataatgacggtacttgaggaggaagccccggctaactacgtgccagcagccgcggtaatacgtagggggctagcgttatccggatttactgggcgtaaagggtgcgtaggcggtctttcaagtcaggagtgaaaggctacggctcaaccgtagtaagctcttgaaactgggagacttgagtgcaggagaggagagtggaattcctagtgtagcggtgaaatgcgtagatattaggaggaacaccagttgcgaaggcggctctctggactgtaactgacgctgaggcacgaaagcgtggggagcaaacaggattagataccctggtagtccacgctgtaaacgatgagtactaggtgtcgggggttacccccttcggtgccgcagctaacgcattaagtactccgcctgggaagtacgctcgcaagagtgaaactcaaaggaattgacggggacccgcacaagtagcggagcatgtggtttaattcgaagcaacgcgaagaaccttacctaagcttgacatcccaatgacatctccttaatcggagagttcccttcggggacattggtgacaggtggtgcatggttgtcgtcagctcgtgtcgtgagatgttgggttaagtcccgcaacgagcgcaacccttgtctttagttgccatcattaagttgggcactctagagagactgccagggataacctggaggaaggtggggatgacgtcaaatcatcatgccccttatgcttagggctacacacgtgctacaatgggtagtacagagggttgccaagccgtaaggtggagctaatcccttaaagctactctcagttcggattgtaggctgaaactcgcctacatgaagctggagttactagtaatcgcagatcagaatgctgcggtgaatgcgttcccgggtcttgtacacaccgcccgtcacaccacgggagttggagacgcccgaagccgattatctaaccttttggaagaagtcgtcgaaggtggaatcaataactggggtgaagtcgtaacaaggtagccgtatcggaaggtgcggctggatcacctcctttctaaggagaattgcctactgtttaattttgaaagttctttacgaactttatatatgggagtgtagctcagttgggagagcacttgccttgcaagcaaggggtcaggagttcgactctcctcatctccaccatttaagagtatattacttaaatctttgatttacttagtagcctcttacaatgcacttatagcttaaatttatacaagctttgtgcgttagcactttaagcaacagaataaactgagcgcatgtgaagtttgtttgttggcgctgtgctttagcacttttagtaacggaataatctgagtgaatacgaaggttgttcgttgacgtggtgcgttagcactttaagcaacggaatttattcgttggcgccgcgctttagcactttgaaaactgcatatatatttagtgatatgacatctaatttgtaatatataaagctgataactttttaaaattatcgaagttgatagcttctaatctatcaaacctttttaactggtcaagttattaagggtgcagggcggatgccttggcactaggagccgatgaaggacgtgataagctgcgataagcttcggggagttgcacgtaaactttgatccgaagatttccgaatgaggaaactcacttagagtaatgtctaagtatcattaagtgaatacatagcttaatgaggggaactcagggaactgaaacatctaagtacctgaaggaagagaaagaaattcgattccgtaagtagcggcgagcgaacgcggattagcccaaaccaataaagttttctttattggggttgcggacatatcataacgaagaggtatcgtaattgaagaggtttggaaagacccaccacagaaggtaatagtcctgtatgttaaacgagaagacttcagatatgatccagagtaccacgggacacgtgaaaccctgtgggaagcaggagggaccaccctccaaggctaaatactacctagtgaccgatagcgtatagtaccgtgagggaaaggtgaaaagaaccccgggaggggagtgaaatagaacctgaaaccctgcacttacaagctgtggaagcacatttcttgtgtgaccgcgtactttttgtagaacgggccaacgagttacgttaagtagcaaggttaagcacttaaggtgcggagccgtagcgaaagcgagttttaactgagcgttcagttacttgacgtagacccgaaaccgggcgacctacccatgagcaggatgaagcgaaagtaaaatttcgtggaggtccgaacccacgagcgttgaaaagctcggggatgacttgtgggtagcggtgaaattccaatcgagcccggagatagctggttctccccgaaatagctttagggctagcctcaaggtgagagatacggaggtagagcactgaatgtcctagggggtattgcacctaccgaagactatcaaactccgaatgccgtcatcttatacttgggagtcagactgtgggtgataagattcatagtcgaaagggcaacagcccagatcgtcagctaaggtccctaaatgtaagttaagtggtaaaggatgtgggattgcacagacaaccaggatgttggcttagaagcagccactcattcaaagagtgcgtaatagctcactggtcgagtgatcctgcgccgaagatttccggggctaaaacttactaccgaagctacggcatcagtaatgatgggtaggggagcttcccatacgggttgaagcatgaccgtaaggacatgtggacagtatgggagtgagaatgttggcatgagtagcgagatgtgggtgagaatcccacaggccgtaaacccaaggtttccaggggaaggttcgtccgccctgggttagtcgggacctaagctgaggccgaaaggcgtaggtgatggacaacaggttgatattcctgtactaccgataaccgtttgagagaagggatgacacagtaggataagctaagcacactgttggttatgtgtgcccaagcattgaggcagtcaaagtaggcaaatccgctttgataatgctgggatgtgatggggagcgaaatttagtagcgaagtagctgatttcacactgtcaagaaaagtctctatcgaggttaaaggtacccgtaccgcaaaccgacacaggtgggtgaggagagtatcctaaggccagcgagagaactgttgttaaggaactcggcaaaatgaccccgtaacttagggataaggggtgccaccatcaggtggccgcagagaataggcccaagcgactgtttaccaaaaacataggtttctgctaagtcgcaagacgatgtataggagctgacgcctgcccggtgctggaaggttaaggggatctgttagagcaatcgaagcagtgaacttaagccccagtaaacggcggccgtaactataacggtcctaaggtagcgaaattccttgtcgggtaagttccgacccgcacgaaaggcgtaacgatttgggcactgtctcaacaacagactcggtgaaattgtaattccggtgaagatgccggatacctgcgacaggacggaaagaccccatggagctttactgtagcttgacattgggtcttggtactacatgtacaggataggtgggaggctttgaaaccaggacgccagttttggcggagccatccttgggataccacccttgtagtactgggactctaaccataggccatgaatctggtcttgggacactgtcaggtgggcagtttgactggggcggtcgcctcccaaaaggtaacggaggcgctcaaaggttctctcagtacggtcggaaatcgtacgtagagtgtaaaggcaaaagagagcttgattgcaagacatacaggtcgagcaaggatgaaaatcggacttagtgatccggtggttctgcgtggaagggccatcgctcaacggataaaagctaccctggggataacaggcttatctcccccaagagtccacatcgacggggaggtttggcacctcgatgtcggctcatcacatcctggggctgtagtaggtcccaagggttgggctgttcgcccattaaagtggtacgcgagctgggttcagaacgtcgtgagacagttcggtccctatccgtcgcaggcgtaggaaatttgagaagacctgtccttagtacgagaggaccgggatggacgtacctctggtgtaccagttgtcctgccaagggcatggctgggtagctatgtacggaatggataagcgctgaaagcatctaagcgcgaagccaacttcaagataagatttcccaccgcaagggtaagaccccagaaagactatctggttgataggtcgaaggtgtaagtgcagcaatgtatttagcttatcgatactaataggtcgaggacttgaccaatatttatttgatgttcattgattaagatatatgtgtagtttttagagtgctaactctaaagaaactagtattgctaggttctataaacttattaaaaacttaatagaaatattaagcataaagattatgtggttacaatagcagagaggatacacctgttcccattccgaacacagaagttaagctctctagcgctgatggtacttggtgggaaactgcctgggagagtaggacgtagccacgttaaatgttccaaggtagctcaacggtggagcaaccggctgttaaccggtaggctgtgggttcgagccccacccttggagccaaaaaagccgaagtggcggaactggcagacgcacaggacttaaaatcctgcgggacttacctctcgtaccggttcgattccggtcttcggcacttataaaacaatatcgcggggtggagcagttggcagctcgtcgggctcataacccgaaggtcgtaggttcaagtcctgcctccgcaaccattaaaacggctcgttggtcaagaggttaagacaccgccctttcacggcggtaacaggggttcaattcccctacgagtcaccaattcaattaaatatgcgggtgtagctcaatggtagagttctggccttccaagccagctgtgagggttcgatccccttcacccgctccaaaaatgggaccatagctcagctgggagagcacctgccttacaagcagggggtcacaggttcgagccctgttggtcccaccattcgcggcctggtagttcagttggttagaatgccagcctgtcacgctggaggtcgagggttcgagccccttccaggtcgccaaattaaataagcgggaatagttcagtggtagagcgcaaccttgccaaggttgaagtcgcgagttcgaatctcgtttcccgctccataataacttgggtgcatagctcagctggatagagcaacgcccttctaaggcgtgtgtccggggttcgaatccctgtgcgctcattaagaaaagtttactataaattatagtaaacttttatattgtttaaaaagacacaggaaacatgtatattacctgtgtctttttatttataaactttaaactatgtaaaaattacagtatattctaatagagttacagtatattcattaatattgtaaacatacggagggtaatgtataatagtctacaagatgtttatgaaggcatcagttaaatataactaattagataagagttatatacattatattgtatactttatggtatttatatattgaaataacttatgaaattatttataaagagatttatgagcatatttttgtctaaacaataagtataagaaattataaaaaattagagactatagtgaattgacaatttaatgtaatatttataagttatactaagtaaattattatactgtgaaatggatatataactttaggtattgtgtattattttcactgtaggagattatatctagttatacataataagttttaatgatagtttatagtaagatattaaaataaatttatctaatctagatatgaaataagttattactttaatataaaaatgaatctaatggaataatattgatgataagtaatatttagattttgtatttgtttatagttaataagtggattatagaatttataataattaatatatattaaacaaagatatattaagatattttagaacataaaactgcattaaggcgcgagtactattttgtattcgcgccttgatggtttgagttatttgagtaaaaactaactttaataagaaatatgtatttattaagttgatatttttaatgtgtttagagattatttaacaatctccaaatataaaactagaattatttacataaaagttaaatagtttgtatagagttagatttatatagtataatacttagtgtaaataattaagaagttatcaaacaggaggataaaactgtgttagatataaattcttttttaaatggattttttaatataatattaagaatgagtatatatgatttaattgacatatctatagtagcgtatattttttacaaaatatttatgtttataaaagatacaagagcagaacaagtgtttaaaggtataatatttcttttattagcaactcaacttagtaacacctttaaattgcataccgtttattggatatctcttaaagctttagattatggagttatagctgctcttataatttttcaaccagaatttagagcaggacttgaacatataggaagagcaaagtttaatttatttggaaagaatgtaaatacttctgaagaaactctcaatagaaatatagaagaaattgtagaagctttatattcactttctagacaaaaaataggagctcttatcataatggagagagaaactagaataagtgatataataaatacaggaactattattgatgctgaaatttctaggcaactattaataaatatatttataccaaatacaccattacacgatggagctgttgtaattagagattctaaggtaaaagcagctgcatgttttttgccattgacggaaagtaaggatttaagtaaagatttgggtactagacatagagcaggaataggggtaagtgaggtgtctgactgtataactctgattgtatcagaggaaacaggtggcgtatcaattgctaaagcaggtaagttatatagagatatttctagagaaagaatgatgaatatattacgtagtaatttaaaaacaaatacagaaacaagaagttttttcaaaggtggtatatttaaatgataaatagactaaaaaataataccaaaataaaaataatatcatttttaagtgcaattgcattatggatgtatgttatggctgtagttgaccctgaagaaactaaagggtttgaagatatacctgtatctataagtaatatgagtgatttaaaggataaaaatcttgttatatatccagacgaaaaattaacagcagatgtatatataaaaggtagtttatcaaaggtacaaagtgttaagaaagaagatatacatgtatatggaaccattgaagacccaatacaaggacagaaggaagtatatttaaaagcaaatattcctcaaggtgttactctagaatttaagcatgatgttttagtagtaaatcttgaaaaaaacataaaagaaaaaagagatataaaggtagaagtaagtggaaattcaaaaagaaatataaataaaattgaacttagtaaggaatttgtcgatgtatcaggtccaagaactctagttaaagaagtcaaaagtgtaagagctaatctagatgttggtaatgagacagatgatttttctaaaaaattgcaattaataccattaaatagtgatggaactaaggttgaaggagtaacattaagttcatcctttgtgactgcaaagatagaactattgaaggaaaaaattgtcccaataagagtaagtctaaatgataataaagataatgatgtactgaaaaactataaattaagtaaggaacaagttacaataaaaggaaagaaagaagatatagacaaaataagttatattaagacaaaacctattgacttagctgatttggctaatggtgaagaaaaagaagttagcttagaaattccagagggtataactcttgaggatagctctataacaattaaattaaatgatacaaaacaattgagtgcagaatttttatataatgcgggagatattgaattaagaaatatcccaacaaatatagataatccaaatgtaatttctgatgtagatataaaagttgttgtagagtcaacggaggatttgagtaagttaaataaaaaagatatttcattatatattgatttatcacaaggccctgaggaagatagtaaatataaaataaaatatgaaacaacatatcaatttaaaaaaataaatatagaacctaatattgttgaagtggaatgaacaaatatttcgaatatttagttgttacaagatgcgacaaaaaaacctataaaattaagtttgttaattttatgtttttgttgcatcttgtttattttagttatattataaaataaggacaatgagatatttgttaaatctaaaaagcgctagatatatgaaaaaagactgataaatagatttaaataaatattttgaattaaatatttcaattatctctaggaaaacgttgctgaacgagttataatttaattgagatataaaaagttctatttcaaaaaattcaagatgaggtggaaatgcatgagaagttttgaagaagtaattaagtttgcaaaagaaagaggacctaaaactatatcagtagcatgttgccaagataaagaagttttaatggcagttgaaatggctagaaaagaaaaaatagcaaatgccattttagtaggagatatagaaaagactaaagaaattgcaaaaagcatagacatggatatcgaaaattatgaactgatagatataaaagatttagcagaagcatctctaaaatctgttgaattagtttcacaaggaaaagccgacatggtaatgaaaggcttagtagacacatcaataatactaaaagcagttttaaataaagaagtaggtcttagaactggaaatgtattaagtcacgtagcagtatttgatgtagagggatatgatagattatttttcgtaactgacgcagctatgaacttagctcctgatacaaatactaaaaagcaaatcatagaaaatgcttgcacagtagcacattcattagatataagtgaaccaaaagttgctgcaatatgcgcaaaagaaaaagtaaatccaaaaatgaaagatacagttgaagctaaagaactagaagaaatgtatgaaagaggagaaatcaaaggttgtatggttggtggaccttttgcaattgataatgcagtatctttagaagcagctaaacataaaggtataaatcatcctgtagcaggaagagctgatatattattagccccagatattgaaggtggtaacatattatataaagctttagtattcttctcaaaatcaaaaaatgcaggagttatagttggggctaaagcaccaataatattaacttctagagcagacagtgaagaaactaaactaaactcaatagctttaggtgttttaatggcagcaaaggcataattttaagggggaaataggcaaatgagcaaaatatttaaaatcttaacaataaatcctggttcgacatcaactaaaatagctgtatttgataatgaggatttagtatttgaaaaaactttaagacattcttcagaagaaataggaaaatatgagaaggtgtctgaccaatttgaatttcgtaaacaagtaatagaagaagctctaaaagaaggtggagtaaaaacatctgaattagatgctgtagtaggtagaggaggacttcttaaacctataaaaggtggtacttattcagtaagtgctgctatgattgaagatttaaaagtgggagttttaggagaacacgcttcaaatctaggtggaataatagcaaaacaaataggtgaagaagtaaatgttccttcatacatagtagaccctgttgttgtagatgaattagaagatgttgctagaatttctggtatgcctgaaataagtagagcaagtgtagtacatgctttaaatcaaaaggcaatagcaagaagatatgctagagaaataaacaagaaatatgaagatataaatcttatagttgcacacatgggtggaggagtttctgttggagctcataaaaatggtaaaatagtagatgttgcaaacgcattagatggagaaggacctttctctccagaaagaagtggtggactaccagtaggtgcattagtaaaaatgtgctttagtggaaaatatactcaagatgaaattaaaaagaaaataaaaggtaatggcggattagttgcatacttaaacactaatgatgctagagaagttgaagaaagaattgaagctggcgatgaaaaagctaaattagtatatgaagctatggcatatcaaatctctaaagaaataggagctagtgctgcagttcttaagggagatgtaaaagcaatattattaactggtggaatcgcatattcaaaaatgtttacagaaatgattgcagatagagttaaatttatagcagatgtaaaagtttatccaggtgaagatgaaatgattgcattagctcaaggtggacttagagttttaactggtgaagaagaggctcaagtttatgataactaatgataaaagaataagaatcataactggtcactatggaagtggtaaaagtgaatttgcgatgaactatgttgttaagttaagagatatggtttctggcaaagttgctatagccgatttagatgtggtaaatgtatactttagaactagagaaaagaaagagttaatgaaatccttaggtatacaaccaatagatagctcaattaatgctccaacattagatttaccagcagtatcagcagaggtaatgtctcctatggtagaccattcatacaattctgttatagatttaggtggagataatgtaggtgctagggttataggaagatttagtcatttgttaaaagaaggcgattatgatatgctttttgtaataaatgcaaatagggagaaaactcaaacttctgaagaagttatccaatatataaaagaaatagaaaaatcttctaaattaaaggtaacaggtctaattaataatactcatcttattaggtttactactattgatgatgttttaagaggtcagaaagttgcaaaagaagtttctgaaaaatgtaatataccgataagatatgttgcatgtttagaaaatcttgttgaacagttaccaaaagatttagaaggagaaatttttcctataaaattatatatgagagaagactggatgtagtttgagctcaaatatatagaaagtttaaggaggcttaggtaaatggctaaaggaaaagtatcttttaatcaagaacgttgtaaaggttgtggattgtgtgttgaagcatgtccagtaaaaatcatacaattagactcaaatgtaataaacaaaaaagggtataacccagcaactgtttttgaaatggaaaaatgcataggatgtgcaagttgtgcaactatgtgtccagatgtagttataacagtagaaagagattaatttaattaatatttaagggggaattttaatggctaagatacttatgaaaggtaacgaagcatttggaaaagcagctatagaagctggttgcaaatatttcttcggttacccaataactccacaaagtgaattaccagaatatttatcaagagagttacctaaaataggtggagcgttcgttcaagctgaatcagaagtttctgcgataaacatggtttatggtggagcaggtgcaggagcaagagttatgacttcttcatcttcaccaggagttgctttaaagcaagaaggtataacatatgcagtaggagcagaagttccttgtgttgtacttaatgtaatgagaggtggtccaggacttggaagtatacaaccttcacaagctgactactttatgtctacaagaggtggaggaaatggagactacagaactccagtattcgcaccagctacagttcaagaagctgttgatatgataatggaagcttttgacgttgcagattattacagatcaccagttatggtagttgcagatggtatgataggtcaaatgatggagccagttgaatttagagctcctgagaagaaaagagaattgcctcctaaagattgggcaactgttggaactaaaggaaaaagaaaacctaatgtaataaactctctatacttagaaccagaagtactagaagaccattgttggcatttacaagaaaaatttgatgcaatggaaaagaatgaagtacaatacgaaatgtacaaaacagaagatgctgaatttgtatttgcagcttatggaactacttcaagagtagtaaaaagcgcaattgatatattaagagaagaaggaataaaagcaggtcttataagacctaaagtattatggccattcccattcgaagcattcaaccaaattcctaatgctagaaacatattgactgttgaaatgagtatgggacaaatggtggaagatgttaaaatggcagtagaaggtaaattaccagtttacttccatggaagaccaggaggaatgactccaacaccagcagaaatagttgaaaaagctaaaaaaattattgccggagaattggttgcaggaggtgctagataatggctgttgtatttaagaaaactgaaggattacaagatactcaaactcactactgtccaggatgtacacatggtataatccatagattagttggtgaagtattagaagaactaggagtattaggtgatgctgtaggtgttgttccagttggatgttcagttttaggatataaatattttaactgtgacactcaagaagctgctcatggtagagcgccagctgctgctacaggaataaaaagagttcatcctgaaaatacagtattcacttatcaaggtgatggagacttagcttcaattggtactgctgaaatagttcatgcagctgctagaggagaaaaaataactactatatttgtaaacaatacaacttatggtatgactggtggacaaatggctccaactacattagttggacaaagagctactactgctcaatcaggaagaaatgctgaaactcaaggttatccaataagagtaagtgaaatgttagctacattaacaggagctgtatttgtagaaagagtagcagttgatactccagctcatgttagacaagctaaaaaagctataaagaaagcattccaagttcaacaagcaggattaggatttggaatagtagaagtattatctacttgtcctacaaactggggactagctccaaacgatgctttacaatggttaagagacaacatgataccatactatccattaggaaatttcaaaaatgttgaagttgaggaggtgaagtaaatgtctacagctagagtaatatgtgcaggcttcggaggccaaggtgttatgtctatgggacaattacttacttatgcaggaatgctagaaggaaaagaagtttcttggttaccatcttatggaccagaaatgcgtggaggtacagcaaactgtgcagtaactgtatctaatgagccagttggttctccacttataacagatgatgcaactgcagctatattattaaatataccagcatttgaaaaattcaaagatgatgttattcctggtggaaaaataatagtaaatagttctttaataaaagaaaaagttgatagaacagatgtagatgtttattatataccagcaaatgaattagcagctgaattaggaaatgataaagttgctaatatgataatgttaggcgcttacttaaaagtatctgatactgtagatatagaatctgtactagaagcattcaaaaaagttttcggacctagaaaagaaaaattcgttccattaaacagagaagctttacaaaaaggtatggatgctacatgttctaaagcaactaactaataaagaaaaagatgtcaaaaaaaagacaatagaattatttctattgtcttttttgctgataagtattaaaatgtttttatgactgaaattaagcctataatgatattttatgaactataaaaatataatacaaattacaagcttttcaattatgaaaggagaatctttagtgagaaagtattttggaacagatggagttagaggagtagcaaatacagaactaacatgtgatttagcatataaacttggtagagctggtggatttgtcttagctcaaggagaccacagagtaaaagtagtagtaggtaaggatactagaatatcaggtgatatgttggaagcatctttaatagcaggacttatgtctgttggatgtgatgttattactgttggaataataccaacacctgcagtggcatatttaactagaaaatatggtgctgattgtggtgtggttatatctgcatctcacaatcctgttgaatataatggaatcaaattctttaataagaatggatataaattagatgatgaaattgaattgaaaatagaagaatatatagacgatatagacaaaattgattgtcttccaattggtgaaaatgtaggaagaaaattacatgaacattgtgcacaaagagactatgtagactacctaaaatcaataataagcactgactttaagggattaaaagtagttttggactgtgctaatggtgcgtcatataaagtggcaccaatagtgtttgatgaactaggagcaagtgtaatttcaataaatagttcaccagatggaaataatataaactataaatgtggctctacacatccagaacaacttcaaagggctgttttggaacataatgctgacttaggtcttgcatatgatggagatgctgatagattaattgcagtaaatgaaaagggtcaaattgttgatggagaccatataatgatattgagtgccttaaatttaaagaaaaataataaattggcgcaagatactttggtagttacagttatgagtaatatagggttgacaatagctgctaaggaaaatggaataaatttatctactacagcagttggagacagatatgttttagaagatatggttaaaaatggatataatcttggtggagagcaatctggacatatgatatttttagattacaacactactggagatggagtgcttagttctctaatacttgcaaatataatcttgcaagaaaagaaacctttatcagaaattgcatcaataatgagccaatacccacaagtattagtaaatgcaacaataaaaaatgaaaataagaacaaatatatggaatatccagaaataaaaactgagatagaaagaatagaatctattttaaacggaaatggtagagttttgataagaccatcaggaactgagccattagttagagttatgttagagggtaaagaggaaggtcaaataaaagaattagcaacaaacttagctaatcttatacaagaaaaattatcgtaatttaaagggtattctcagatacaaatactgaggacacctttctaagcgccagaacttagttatagacataattattgagtaatataggaactaagttgacgaggtcagagttaatcgaattgtcggcggatgctctgcggtgtgtttaccatcgaaagacttctttaaataataggagcaatcctatggacaaagggaagccaaagtaaacttatatgacctaactcttaaaatatataaataatatttttaggaggacacaaataatgtgtggaatagttggatatttaggaagtagaaaggcagcagaagttatagtagaagggctttctaagctagagtacagaggttatgactcagcaggagtagcagttaatagttctaatgaagaagaacttaatattagaaagtttaaaggtagactttctgtacttgcagaagacttagaaaagaatcctattgatggaaatttaggtatagggcatacgagatgggcaactcatggagaaccatctgatgtaaactcacatcctcattttaatcaagccaaaacaatagcagttgttcataatgggataatagaaaactatatggaaataaaagaagaattaatttctgaaggtgttaagtttgaatctcaaacagatacagaggtaatagcacatttagtagataaatactatgagggtaatttattagatgctgtatacaaaactatatcaaaattaagaggagcttatgcattaggtgttatatgtaaagaacatggaaatgaattagttgcagtaagaaaagatagtcctcttgtagttggtgttggtgaaggtgaaaactttatagcatcagatatacctgcattattaaaatatactagagatgtttatttcttagaaaatggagaagtagttcatctaaaagacgaaaatgtaacagtttatgactctaatagaaatcttgttgaaaaagaagtatttcatgtaacttgggatgtagaagctgcgtctaaaggtggatatgactactttatgtcaaaagaaattcatgagcaaccaacaggagttagagaaactttagaaagaagacttgatgataatggaaatataattctagacagtataaatatttctaaagaagacttagaaaaaataaataaagtttatatagtggcttgtggaacagcatataatgctggattacttggtaagtatgccatagaaaaatttgtaaatataccagtaataactgatatagcatcagaatttagatatagcgacccatttgtagatgaaaattcattagtaatattagttagccaatctggtgagacagcagatactctagcagtattaagagattcaaaggctaaaggagcaagaatactttcaataactaacgttgtaggttcatctatagcaagagaatcagatgatgtattctatacttgggcaggacctgaagtagcagttgcatcaactaaggcatatactactcaaataacttctttatacatgatagctttagactttgctatcaaaaaaggaacaataactagagaattttatgatagtatgatttctaagatgaaagaaataccatcaaaaatacaagaaatattagacaatgaagaatatataaaagaagttgctaaaacagttgttagttctgaacatgcattctatttaggaagaggtatagactatagcttagcaatggaaggttcattgaaattaaaagagatttcatatatacatgcagaagcttttgcagcaggagagctaaagcatggaacaatagctttaatagaaaaaggaactcctgtaattgccatagctactcaagaaaagttatttgaaaaaatggtttctaatatggaagaagtaagagcaagaggagcttatgtagtagcaatagctcaaagccataataaggatgttgagaaagctgctgataaaataatctatataccaaattcagatgatattttatcaccaatattagcagttgtaccaatgcaattacttgcgtatcatgtctctgtactaagaggatgcgatgtagataagccaagaaatctagctaaatcagtaacagttgaataaaaacagattaaaaattaaatagataatatttattgaaaaaaactcatcctgttatttgtattttataggatgagttttttagataaatattaaatttgttttgtttttgctataataaattttataaaaagattgatattaaatcatctgtaaaatgataaatatatagaccataccaggtatagggaacgataaatatagttcatataaaatatagtgagtacttaataaacatatagtcaatatcagacataaaaaaataatagcttatgagaaaaattaaaatacaaggtattagtaaccttgtgataagataaagtgagtagtttaaaataagaatataaggaactatttataaaagaatataatgaagctaatagagtataagaaaattactttattttagtaaaataatttcaaataaaaatttttttaaattgggagtataaattatgacaaatgattttaaaaaagaaaagaaagaagattattttgttaatcttaaggcaatatctactgaagttttacaagaaaaaatgcaagataacgcttgggttatagttgatactcgcttaaatgatgcttataatggctggaagttagatggagtaaaaagaggtgggcatataaaaagagcagtagatttttctgctaattggttaaatgtatactcagatagaaaagatgaagtgctagaacaagcattgaaaactaaaagaattgatttagataaaaatatagtattgtatgatgcaaatggaaaagatgctttggttgtagcagattatttatctaaaaaaggatataaatatctatataaatatgatattaaacaatgggcagacgatgaaaatcttccaatggaaagatataaaaattatcaaatgatagttcctgcttttataataaaagatatattagatggaaaaattcctgagacatttgaagattcaaagaatataaaaatgattgaagcgagttggggagaagaatcgtatacaaaagggcatatacctacaagtgttcatgtaaatactgatattatagaacctcctccaacatggatgcttgataatgatgataacttaactaagtttgctttagactatggactaacaaaggatgatactgtaatagtttcaagtattacacctatggcatcttatagactagctgttatattgagatatataggagtaaaagatgtaagagttttgaatggtggaacaaactcatggttatcagcaggatatgaattagaatttattagtaatccaaaacattcatgtactaattttggagcagatataccagttaactcacaattagttgttactacatctgaattaagacaaaaactaaaagaaaaaaataagtttatactagtagataatcgtacttgggatgaacatataggaaaagtatctggatatacatattatgataaaaaagggcgtataccaggagctttatatggacattcaggtagtaatagtgtttcactagaagaatatcgtaatattgataatacaatgagaaataaatctgagattttagaaatgtgggacaaggaaaatatagatgtgaataaacagcttatatttatgtgtggaagtggatggcgtgctgctgaagtattaacatatgcaaatgtcataggagtggaaaatacctccctttatagtgatggatggatgggctggagtcttgataattcaaatttaattgaagtgggagaacacaaataaagtttttgaaagtacaatagagttgtttaaaacaaaggtgtttttgatttattaggaagagtgtgtaaattgtgtattgggaagtgtacttaggtatgttcatttggagctatggaaattgataaaaaagtattatctgtttattttgctggtaaaatatgaatagattatagattatagattatagattatagattatagattatagattatagattatagatttaagtatagactaagtaatttatattacagaagataatatataagaattaatgcaagatgtatttgatacatataaggaattggcaagtccaggagaaggatagagaaaattgagattgaagagtttgaaagagattattagatgaaaaatacaaaaatgtataaaaatacatattgagaaagtatatctctcttaaatttgttaataattctattatacagaaaaacatatttaagggggattttttactatgaaaaaagtaaaattagctataagcttttttatattaatgattataggaatgacaatatcttatgcagatacaagtataaatactagatacaatagattaagtaaagctcttgaaatatcagaagcaaattttaaattttataatgttaaaattaattctgttataaatcataatttatcaaataaagaatttcataatatttttatagaaataattaacaatctaaagttggataaaaaaggaataaattggaatcaaaaagggtctggcgataaaatacaattatgtgctactataaaaggtagcgataaagaaatttctataaaaggaataaataaaaataacaaagaaagttacatagtagttgacatattggataacaaagtatataaacataaagaggttatttatagtaacgtagaaaatgtgttaaataaatattcatctcaagtagatgtgtctgcttgtattgttggagaatacacaaaaaggttacaaaacaacaaatatgatgatattttacaaaaaatattatataatatgagtgctaagcaaatagatgaagttaaagacgtaaactttttatctataacagcatatagtaaagtattaaatgattatgaattagaatatttaggggaaaaaattaatttaaatataggaattaaatataatgaggatgacggaaaaacactcatatatattgccacaccaattataaaattagattattaattatgaggagatcaaaaaatatggctaagataatagtaaaaaagagtaatccacttaaaggtagtgttaaaatagatggtgcaaaaaatgcagttttaccaataatagcagcgactttattagcaaacggaaaatcaacattaaatggagtaccaaatttaagagatgttcatgttatatcagatttattaagacatgtaggagcagaagttgaatataaagaaaatacacttactgttgatgcaagcaatataaaaacttgtgaagctccatatgagcttgtaagaaagatgagagcttcttttttggttatgggaccattgcttgctagatttaatagtacgaaaatttctatgccaggaggatgtgctataggaacaagacctatagatttacatttaaaaggatttaaagccttaggtgcaaagatagaaatggaccatggttttgttgaagcagcaacagaaaagttagtaggaaataaattatatttagatttcccatctgttggagcaactgaaaacataatgatggcagcttctttagcagaagggactacaataatagagaatgcagcagaagagccagaaatagtagatttagcaaacttcttgaacgaaatgggagcagatgttaaaggtgcaggtactaatactataaaaataaaaggtgttaaagagttaaaaggagcagaacataatgtaattccagacagaatagaagcagcaacttatatggttgcagcagctatgacaaaaggtgatataactgttgaaaatgttttaatggagcatttaaaaccagttgtagctaaattaagagaagctggttgcgaaataacagaaatggacaattctgtaagagttgtaggtccaaaagtattaaaaccaatagatataaaaactttaccacatccaggatttcctacagatgttcaagcacaatttatggctatgcttactgtagccaatggaactggtgtagttatagaaactgtttttgaaaatagatttatgcatgttgctgaatttaatagaatgggtgctaatataaaaatagatggaagaagtgcggttgttaatggtgtagatgagctacacggtgcagcagtaaacgctactgatttaagagcgggggcagcccttattttatgcggtcttatagcagaaggagaaactcaaataggagaaatataccatatccaaagaggttatgttgatatagataagaagataacagcactaggtggtcaaatcgaaatagtagaagattaataattggtttatagaagaaagttataaattaatagggttgttcatatacttaaatacaaggttttaaaagctaaggaggagagtatatgaagaacccattggttgttttgttaggatttgtgacttgctctgtgttagttccatcacttataactttagtttcttataaaaatgtagaattaactgaaaaaccagagagcccagtatctataaacaaaactattaaaaaaagtgatattgaagacaaaggtaataaagaagaaaaaagtacagtgagctatgaaactgtaaataaaaaagcaccaattatcaatgtatataatcatataacagggaaaaccgaaaagatggacatggagaactatttatgtggagtactagctggtgagatgtcttcagagtttgatatagaagctttaaaagctcaatctgtagcagctagaacatatgtagtatataaacaggaacatggtaaatctagtaaacataaaaatgcagtagtatgtactgattataaacattgtcaagaatataagagttatgatactcttaaaaaattaaatggtgaagaatggattaagaataaatattccaaaatccaagaagcagttagaggaactaaaggtcaaataataacttataatgataaggcgatacttcctctttatttttctacatcttcaggaaaaacagaaaatagtgaagaagtattttctgcaaaatatccttatttaaagtctgtggaaagtccttatgataagtattcccctaaatttgcgtcaacacttaaaataagtaacacagattttgttaaaagtcttagaagggcatatagcactattgtgatagatgtgaataatttaagtaaacaagtttcaataactaaaagaagtgatgccggaactgtagaaaaaataaaattaggaaataaagaattgactggaaaagacattagaactgtttttaaattgaactctgcaaactttgacataaaatttggagaaggatacatagatttcgtggtaaaaggatatggtcatggtgttggtatgagccagtggggagcagaaggaatggcagaagagggctataaatattatgatatattatcacattactacacagatacaaaaataaaagatatatactaataattgtataaaatgccaaaaacacgtcaataatccaaatgtagaaatatatttggaggtgcaaaatgaagaaaaagctgttagaaaaagatggtttttatttatctttgtttgtatgtgtttgtttattagcagtaggtggagtttggtttacaaataataatgtagataaattggcttctaataaaggaattatggaaaatgctaataaagatagtgaagaggaaatacatttaattgaaaaagacaagaaagatgctatccctactgcaacggattcaaaacaaaacttagaaaaagctaagtcaaaagaggaaaataaatcgagtacaacaaaattaaattacattggagataaagtaataagaggatattcagaaaaagaacctagttattctaaaactcttgatgtttgggaaactcataaaggtgtagatattagttgtactaaaggcaaagaagtaaaatctctattaaacggaatagtagtagatgtatttaatgatgaagaatatgggcaatcagtcaaaataaaaagtgacaataacattgtagtagtatattcaaatctagataaaaatgttagtgttaagaaagaacagaaggtaacagaaggacaatctctaggtactgtaggtagtacttctcaaatagaaagtgaagaaggtatacatgttcatttagaggcgtatagtggagaaaaatctatagacccaatgagtctaattaagtaaaagtataacaagtttaatcatatttggttaagcttgttatattttttggtgtttttacatatatatcattaaagctattatgtgaggggggtaatctttgagatctcatatagaggaaagggccatagtggtagcaaaatatatacttgaaaaaaacactacagtaagacaaaccgccaagacatttggagtaagtaaaagtacaattcataaggatgttacagaaagattgaaggaaataaatccatcccttgccaaagaagttaaaaatgtgctggacaaaaataaatcagagagacatattagagggggattagcaacgaaattaaaatatgagaaggaacataaaaaaatgtaggttaaaaacctactttttttattgaattaaattataaaaagaaatatattaagtaattataaatagcaaaataataatactctcaaaagatttattttctcttgattaaagcgagatttttgtatatgctttattataggagtattaaaataggcttataatataatctaatattataaataaaggagttgaaaaaatggctggagctgatataggcatagatttaggtactgcaaatgtgcttgtttatgttagtggtaagggaatcgttttagaagaaccatctgttgtggcgatagacaaaagaacagattctgttttagctgtgggagaagaagctaaaaagatgatagggagaacaccaggtaatatagtcgctataagacctttaagagatggtgtaatttcagattatgatgtaactgagaagatgttaaaatcttttatagataagatagttgataaaaagggatttggaagattttttatgccaagaattatggtatgtgtaccaacaggtgtcacagaagtggaaaaaagagcagtagaagatgctacgagacaagctggagctagagaagtatatatcatagaagaaccaatagcagctgccataggagctggtgtagacatatcacagcctaatggtaatatgattatagatattggtggaggtactgtagatatagctgtaatatctctaggaggagctgttgtaagtgaatctataaaggttggtggagatagatttgatgatgctatagttaaatatatgaaaaaacaacacaatcttcttataggagaaagaacagcagagaaaatcaagtttgaaataggttctgcatttaagagagaagaagaaaaatatatgaagataacaggaagaaatttaattacaggacttcctagttctataactataaattcaacagaaatgttggaagcacttagagaatgtgttgagcaaatagtagttgctactcatgctgttttggaaaaaacgcctcctgagttagcagcagatataggagatgtcggtataataatgactggaggaggttcattattatatggattagataaaataatagaacagaggacaggaataactgttacaatagcagatgaaccattatcttgtgttgcaaaaggtacaggaatagctttaggttcaatagacttacttgaaactggtgggtctttcaaaagaaaataattaggagagtttagaatgttaaatatagatgaaataaaaaaattaataccacatagatatccatttttattagtagacaagattacagagctagaagttgggaaaagagctgttggtataaagaatgtaacagttaatgaaccatttttccaaggtcactttccagaatatcctttgatgccaggagtactaatagtagaagctctagcacaagtatgtggagtggcaatgatgtctgtagaggaaaacaaaggaaaactaggtgtatttgcaggtatagataaagttagaatcaagagagaagtaagaccaggagatacattaactatggaaattgaaatgacaactcttagaaaaaatatagctaaggcagatgctaaggcatatgtaggtgaagaacttgtctgtaaaggtgaattaatgtttgctttagtagaaaaataaaaacttgaaatataaaagtaaaaaggtagataatttggagtatttaatcagatactctaaaatatctacctttttatataaagaattttatcatttagtttatatttagattaggtggatactaataaagccaaggctattgtttcagctaaatctaatataaagctaaggcgtatattattaaatgaaagtttattattttcatcaattttatctacaattcctactatagaataatttcctatttgaggtagttttttaccaacaccttttccgggcaggataggtccttctctaatctgtatattacctatgttactctgcgaccccaagcaagcatctatagccaagaagttaccttgtatatgtgtattttttatagtatctaaagactcatatatatttaaggcgtgaatagggttatctagtgtaccgtaaacggggtatttaaagttactgttcttaagtattgttccaactaaagggcctaaagtatcacctatagccctgtctgttcctatgcaaacaacaatcgtattttcattaattatagtttttagaactgaacttagcatctgtataacatcatcatcgctgtagtttactttagctaaatacaataggaacacccccttcaaaaaaatatatgaataaaaagcattaaaaagacctaactttaaatttcagatagatagaaaattttatttgtcttacaaaaaaaggaatagaaaaaatatgactaaaaatattgacaaaattttaaaaaaatagtaagctagtaaagtaaaacaaaacttaaatcttgattaccttatcaagagaggctgagggataggccctgtgaagcccagcaaccacccaaatgggaaaaggtgctaattcctacaagacaaaagtcttgaaagatgaggtcagttaattagtatgtaattacgattattaacctcttcttataaaggagaggtttttttattttgagtaaatttctaaaattaaaaataaggtaaaacctataataaaaattaagaataaataagggggaataaaaatggcaagacatttatttacgtcagaatcagttacagaaggacatcctgataagatatgtgaccaaatatcagattcaatattagatgcattattagaaaaagacccacaatctagagtagcttgtgaaactacagttactactggtttagttttagtagcaggagaaataagtacatctgcttatgtagacattcctaaattagtaagagaaacagtaagagaaattggatatacaagagcaaaatatggatttgattgtgatacttgcgcagttataacttctattgatgaacaatctggagatatagctatgggagttgatgaaggtctagaaagtaagactggagaagagatagaagaagaaatagaaaaagttggagctggagaccaaggtataatgtttggatttgcatgtaatgagactccagaattaatgccacttccgatatctttggcacataaattatcaagaaggcttacagaagttagaaaaacaggtttagttgattatttaagaccagatggaaaaactcaagttactgttgaatatgaaggaagtaaagctgtaagagtacatacagttcttatatcagctcaacattgtgaaacagtatcaaatgataaaataagagaagatttaattaatcatgttattaaggaagttataccagcagaattacttgatgaagagactaaaatttatataaatccaacaggaagattcgttataggaggaccacaaggagatacaggtcttacaggaagaaaaataataatagatacttatggtggatattctagacatggtggaggagctttctcaggaaaagaccctacaaaagttgatagatctgctgcttatgcagctagatatgttgcaaaaaatattgttgcggctggtcttgcagacaaatgtgagatagaacttgcatatgctataggtatagctagaccattatctatatttatagatacttttgggacaggcaaggtttcagaagaaaaacttgttgaattagtaaataaacactttgatttaagaccgggagcgataataagagacttagatttaagaaagcctctttataaaaaggttgctgcttatggtcactttggtagaactgatatagatttaccttgggaaagaactgacaaggttgagcagttaagaaaagatgctttaggtgaataatttttaactaaaaagctgttagaatgtaattttacgattactttctaacagtttttttattatgagttaaatatttttaataaatgttaatttatcatcatataatgaataaacagtatttaatctggtcaatacattttatataatactctactaaatttatacatattatgggatatatgttaaaggatggttaagaatgtgttaactaatgttaaataattaaaaatatattgaaatatcacaataatgagtctaatataatcttaataaacttacactttaaaaataattttaattgggggggagtagtgtatgtcaggcaaagtaaatattaaaacggttataagttttgctggagcttatgttgctactgtaataggttctggatttgcaactggtcaagaaatactgcaattttttacgttttatggatatgcgggtattataggtggaataatctctatggtactattttcatggtttggagcagaagttatagataagggaagagaattgaaacttaaggagccaataaaaatttatcaagtatattgtggaaaatatcttggaacattttttgaatggtttggtccattgtttttatttggaacattagtaataatgattgcaggagcaggagctacactatcagagtactatggattaaatccatatgtaggtaggattggtatggcaatcgtttccctaataactgtttcattaggtttgacaaggctttctaaaatactaggtaatataggacctataataataatatttacacttttagtaggagcaattagtttatttagcaatattgatgctttatcaaatgctggaaatatggttgatagtttaaatattaaaactgctacatcaaatggatatttctcgggagtactttatacttgttacaatgtaataatagtaataacattcttgacaggaatgggagcttctgcagtaaataagaaagatgctgtatggggtggtatagtaggtggagtagcacttatggcagcagctataatgatgaatttggcattactttcaaacataggaaatatatacacaaaagagataccagcactttacttagctgataagatatctccaataataggtattttattctcagtagtacttttactaggaatatacactacagctgtaccattgttatggtcagtaactaaccgatttgtagaagatgaccaccctaaatttaaaattataacaatagtggtaagtatattagcttgtataggaggtttactgccatttgataagttagtaggtacactatatccatatacaggttacatgggaattttaattttactatgtatgctttatagaagaattactaaaactgaggggtacaaggagaataaatctgaaataagttagtactgtaatatacttatggaatttaatttatactctaaatatagagtaattaaaataaaatagctatttaaatatggtacctgtatttcatggtaccatattttatggatgcagattttttttgtttctgataaaatgtataatagttggaaattacgttaagtataaaaatataaaacttttctacgattatcatagttttaatatataaaattatactaacatttaaatggagcgattattagtatttttaggagataaaaatggaaaaattagaaggaatgataagtgaaatagtctttaaaaacgaagataatggttatacaatagctcacctggtaaatgaaaatgatgaaattgtggttgtaggatgtatgcctactttggcaattggagaaagcatagaagttgaaggaaagtgggtaaatcataagatttatgggactcaatttgaagtgaatagttttatgccagtaacgccatcatccttagaaggaatttatgtttacttatcttctggaatgatacatggtattggtgaaaaaatggcaaaaagaataattgataagtttggtgtagatacgttagaggtgatacaaaattcaccagaaaaattacaagaagtagaaggtatagggagtaaaaaagtaaaacaaatagtaaaaagttatgaagaagacagagaattgagaaatataataatacagctatctccttttggaataacaccaaattactgcctaaaaatatataaaaaatataaaagcagtgcaatagaagttataaataaaaacccataccaacttgctgaagatataagaggaattggatttaaagtagctgatagtatagcaagtaaaattggtatagataaaaactctaaagatagaatttgtcagggaatcttatacactttaaataaatctttaagtaatgggcatacatatttaccagagcatgttctaatacaagattcggaaaaattattggagctaaatggagaaataataaaagagtgtgtaatgatgctagtttataatcaaaaaatacatatagagaaagtaaacaatgaaaatcttatataccttatgccatactatttagctgaaaatggagtatgtagtcaaatagtaaaattatcacagtatgaatttgaagacttaaaaatagatatagataacgagattaatgttttagaagaagataagaaaattaagttagcagaaaaacaaattttagcagtcaaagaatctgttaatagtggagtattaattataactggtggaccaggaactggtaaaacaactaccattaatgctatcatagatatatttgaaaataatggtaaaagtgtgactttggcagctccaacgggaagagcagcaaagagaatgagtgaaacttctaataaagaagcaaaaactatacataggttgctagaaatgggattttcaacagatgatgatttaactttttttaaggatgaagaagacccaataaattcagatgtaataattgttgatgaggtatcaatggtagacattatcttaatgtacaatttacttagagctataaagttaggaacaagagtaattttagttggagatagtgaccaattaccttctgtaggtgctggaaatgtacttaaggatatgattaattctaatattataaatgtagttaaattaaatgaaatatttagacaagcgcaagaaagtatgataattgtaaatgcccataagataaacaatggagaaccactttatctaaatacaaaaggtaaagatttcttttttataagaaaatcaactaatgaagaaattttaaatgaaataataggattggttaatgaaagattacctaaattttataaagttgataaattaaaagatatacaagttttatcttcaatgagaaaaggtgaattgggagttactaatctcaatatagagttacagaagtatcttaacaaaaaagaaaaatttaaagttgaagaaagtttttctaaaagattatttagagttggcgataaggtaatgcaagtaaaaaataattatacaaaaaaatgggaaacagaagaccaaaaagaaagtggagaaggtatctataatggagatataggatatgtttatcacatagataaagataagaaaactatttatatattatttgaccagactaaaattgtatcatacctatatgatgaattagatgaaattgaccatagtttttgtacaacaatacataaaagccagggaagtgaatttccagttgtagtattgccaatagcgtgggctcctcctatgttacttagccgtaatttattatatacagcagtaacaagagcaaaaaaattagttgtattagttggagatgtgaaatatcttgaatatatgataaaaaataatagagttaatcaaaggtattcaaatttaggatataagctaaataaatttaaacaagaagggttgttgatagaataaatatgaaaatatgcaatgataattttattaagaattttaaaaatatgattaataaatgtttggattttatatatcctgagaatataagttgcataatttgtgataaatccataaagaaaacaaatacttattcaatatgtaaaagttgttttaaagaaatgaattttatacaagatggttgcatgaagtgtggaaaaccaataatacgtcattcaattgaaaaagaatttattgaagagtgtagttattgttttaataaagacttttattttgataaatcaatatcttgtattgaatataatgatgtgacaaaaaagatggtgttagggctgaagtataaccaaaaaacctttatggctaagtatatagctcaaataatgaaagaaaaattatatttagaaaacataaaatttgattatatattatttgttccacttcataaaaaaaggctaaataaaagaggttttaatcaggcacaaaaaatagcatttaatttaagtaaaatagtaaatattccattattagattgcataagtagaaaaaaatatacaagaatgctatataaattgaataagaaagaacgaaaagaagaattaaaaaatgtatttgttgttaaagaaaatgttaaattaataaataataaaaatatacttttaatagatgacatatttactactggtctaacaacaaacgaaatctctaaacttttaaagttatcaggtgctaataaggtttttgtattgactctacttacaaaagcaaatgataattatattatggaataatcttatatattgacaattttagtttaaaatattaaaatgaataagtgatatttaggtctgtggttgaaagtccaagccagtcgcaggcaaagggatccacgtaagttaacactaaaaattgggttaatgatcatggtgcggcttagaagtaagacctaccgataataaaatcgagagagagtagtagtgcggcgaacccaagcgaaccctccagtaggcgagtgtggggtcaaaaaccaggtcagctaaatatcatattaaaagagagctagcatacctttatgtatagctcttttttatatataataaatttaggttgagtcataaagaggtgatatgtttgaataaaagacaagaaaatttattaacaacattgctattaaaagaagagtttataaatgttaataagattgccaatgattttgagtgttcagaaaggacaataaggaatgattgcaaatatattgatgaatggttatctactttttgtaatgcttatatcaaaagaaaacctaatattggaattaaatttagtggagatggaacagacaaaatactggtaaatcagaagttgcgaggtgaagttaaaagagtaaatagtgagcttcataagcaagttgagatattaaatttactactttgtaataataaaaaagttactttaaatgatttatctaataagttgtacataaataaaaatattgtcagagaagaaataagtaaattatcagtagcattaaataattataatttaaatgtctcgactaaaaaaggcagtggtatatatattgaaggggatgagaaagacataagaataatgttagtatcattcttatttaaatacatagataaatacagattaaacatagatgaaatagagtacttccatatagtagatataataattgtaaaaaacataatgcttactatagaggaggatatggatataagacttacagatatatcattcaagcaattgatgctatttttgcttataaatataatacgaataaggctgggaaattctttaaaagtatcaaatactaagaaagagcttaagctaaaaatgcttatattggatatagaagatgaattgaaatctaatttatccatagtattaaattatgaagaaaaattgtttatagaatctttaatattgggtatgaacaaacaaataaatagtaataatattaagaaatctttatatctaaatgaagaattagcaagttatacaaaaaaaattataaatttagtatcagaagaatcaggaataaattttaataatgatatattactttatgaacaattaatatgtcatttgaatgttacaatgcatcaaatgaaaagcaatgtttacttagaaaatccacttttagataacataaaaactaaattttgttttttatttacagtaatatcaagttcaatagaaattgaattaaaaggaaaacaaataacggaagatgaaattggttatcttacacttcactttcaaacctctctagaaagaaaatacagcaaaagggaatcaaataaaaaggcaagtattgtatgtccatttagttttggagtaagtatgctattaaaagtaaagatagaaaagagatttgataacataaaaattattgaaacattaagagaggaagatttaaaaagagataactttaataagactatagattttataattgcatttcaagagtatgaaaatatccaaaaaccaatttttataacaacaccattatttactgatgaggatgagaataaacttaaagagtttacaaacaaaataaaagaaaaagacacctcatataaacttatgaacagattaatgatgtctgattatttaataagagagttagaacatgatgatatttatgaagctataacatatttaactaatttattaattgaaaaacattatgcagaaaaagagtatttacaatctattataacaagagaaaagtcatatccaaccaatgttggaaaaggaatattattccctcatggagacatgaaatatataaaacaatctgttttatgttttgcaaggttaaaaacaccaataaaaattagaaatggaaaggatataaagattatacttttattagcatataaaaaagatgatgatagaaaagtatttagagaattatttaaagaaatatctaatttaacagaggatgaaaatatgctagatattctaagtaaatgtgacattgaaaaggtaaaagatattcttatataaaattcataatgaactatggataagcacaaaattttccatgtgatggaaaaagttgtgcatgtttttttgtttttataagatattatatgtttgtaaggtataaataatctaaaagtagagaagcaatttaggaggaaaaaatggaagaaatagttttaaagattataattcatgctggaaatgcaaaatctatgctttatgaagcacttgactatgcaaaggaaaacgattttaaaaaagcagatgaattaattgaaaatgcaaatgaagaaattttaaaagcacataaagtacaaactgaacttatacaaaaggaagctgggggagataaatcagatatatctattttattgattcactctcaagaccatttaatgacttgtatgagtgagagaaaccttataaaagaaatgattatgttaagaaaagaaattcaaaaattaaaataaaaaaattaagggggatttaaaagaatgaaaagaaaagtatatttattttgtagctttggtatgtcaacaagtttacttgcagataaaatgcagaaggtagcagatgaacacaatttaccaatagaagtagaggcatttccgatagcagaaattgacaaaatagttgaagaaaaaaatccagattgtatattattaggaccacaagttaaatacatgctaaaggagttaaaaccaaagtttgaagctcaaggaaaacttatagatataatcaatgaagttgattatggaactatgaatggggaaaaagtattaaaacttgctataaagctaataaaatctaaacaagcgtagaattatagtaaaaaataataggaaatgagggtggatagatgaatagattggaaagaatacttatgccattggctgaaaaaataggtaaaaataaattattaattgcaattagagatggttttttaatatcatcaccattattaataataggttcattatttttattagtagcaaattttcctataaaaggatggaatgaatttgtaggtcaaatttttggtccagattgggctgtaaaattgcaacaaccaactgtagcaacatttgaagtaatgactttacttgcagttttaggaattggatattcttatgcaaagcaaatagatgtagatccaatagcatcagctgcagttgcaatagttgccttttttatagtaacaccgtttgtaataccatatacaccagaaggaacagaatcagtctacatggtaacaggtataccactaggttggatgggctctaagggaatgtttgtaggtatgataacagcaataacctctgtaaaattatttgctgcagttgtaaaaaaaggatggacattgaaaatgccagatggagttcctccaaccgtatcaaaatcatttgcagcattaataccaagtgcaatagttatggtagttttctttttagttaagatagcttttgaagctacaccatatggaagtatacatgaatttatatttaagtttttacaaatgccattattaaaattaggaaatagtttaggtgctatggcaatcgcttatatattcttacatttattctggttctttggaataaatggaagtagtgttgttggggctgtgtataatccaatattaaaaattctatcagctgaaaacttagctgcttttcaggctggttcaaaaataccaaacataataacaggtcaattccaagatatgtttgcgacatttggtggagcaggtagtacactatcattagtcatagctatgttattaatatgtaaaagtaaacgtataaagtcaatgggaaaactatcaattttaccaggaatatttggtataaatgagccattgatatttggtctaccaataatgcttaacccaatactattgataccatttgcaatagttccaacaataaatataataatagcttacttctgtatgtcagcaggattagtgcctcttacaaatggagttcagttaccgtggacaactccaattatattctctggttttttaacaacaggatggcaaggtgcagtcttacaattagtgcttcttatactaggaatatttatgtatataccatttataaaaatgctagataagcaatacttgagagaagaaaatgaaactgttgaagaggaagatgatgatatatcttttgatgatttagtattataggaggaagattatgaagaaaatagttatgatattggatcaaatacaagctggagctggaggaaaagagaaaagtaatatacctcctgctggaaaatcaagcccattaggaccaggtgtaatgatggagcaatttttaaatgaatctaaggtaatagctaccttattttgtggggatgaattttttgtaaataatgaaaaagaagtaacgagtaagatgatagctatggtaaaaaaattaaaccctgatgtagtaatctgtggaccaagctttaattacgaaaacttttctaagatgtcagcaatactgtctaaaaatataaatgataaaacagatataccagcttttgcagctatgtcagaagaaaatatagatgtgataaacgaatataaaaatgacatatgtatagttaagactcccaaaaaaggtggaattggtcttaatgattcattaaataacatatgtaaattggcaaaagcaatagcgaataaagaagatataactttgatgaaagaagaattttgttattaataagagtattaattattagcaagtttaaatattatactatttataataagcatacattagtaaaatctatataatttaaggaggggaattttaacatgtggggaatgatagcgacatggagaatggccctagaaggaataactgaggcatcagaacatttagaaaaaggcatggaagcaggtgatgctgtagagcttgctgtaagaagagttgaagactatccattctataaatcggttggatatggtggacttccaaatgaaaattgtgaggtagaacttgacgctgcatttatggatggtaacacattagatattggcgcagttgctggtataagagattattctaatcctgtcagcatagctaggaagttaagttatgagaaggtaaataattttttagttggaataggtgctgaagattatgctcataaaaatggatttgaaagaaaaaatatgttgactgatagagcgaagttacattataaaaagagaaaaaaagagactttagacaaaggattaagcccatatgctggtcatgatactgttggtatgatatctttagacaaaactggaaaaatgtgtgcagctacatcaacaagtggattgtttatgaagaaaagaggtagaataggagattctgcactatctggttcaggattctatgttgatagtagtataggaggagctacagctactggtttgggagaagatttaatgaagggatgtatatcttatgagatagttaggcttatgaaagaaggaaagcatccacaagaagcatgtgatattgcagtaaatgaacttgataaacagcttatcaaaagaagaggaaaagctggtgatttatcattagttgccatgaataataaaggtgaatggggagtagctacaaatatagttgatttcactttttcagtagtaactaaagaagaatctcctgctgtatatatttcaaatagagtagatggaaagactatacataaggttatatcaaatgagtggatggaagcatatgaggctagaataaaagcaccgatagaagtaagtgagtaaagtagtgttacataattaaaatagagttttataataaggagatttttatgaatatcataagtaataaaatagatgagttaaaagaagatttattaagtgatattatagatattgtaaaaatacctagtgtcaaaggggagtcagaaaatggcttcccttttggcgaaaaagtaggggaggcacttaataaagcattagaaatatcaaaaaaattgggatttaaggttagaaacttggataattatattggttatgcagagcatggagatagtgatgattatgtttgtgtaattggacatgtagatgttgtacatgaaggagatggttggaagcatcagccttataagggagaagaaactaatggaagaatttatggacgaggagtactagacaataaaggacctataatgtctgccttatatggattatatgctattaaagaattaaacttaaaattagataagagagttagaataatatttggtacaaatgaagaaagtggatttgaagatataccatattatttagaaaaagaaaaaacacctattatgggatttacaccagattgtaaatatcctgttgtatatggtgaaaaaggcatggcaaagattagaataaaaagtaaaatcaattatgaagaagatgtatacctaggttttatagaaaatatgtctgaaaatgtgcttgttacatataaagagctgaatatagaaaatagtaatactatattagatataaaggtaaaatacgattttagttataaattgaaagatgtattagatgaaataaaagctagttttccaaatagtatcgatatagaggtaatttctaattttaatcctgtatattttgataaagagagtaatcttgttaaaaagcttcagctagcttatgaaagggttacatcattagatggaactcccgtgacaactaatggaggtacgtatgcaaaagtaatgccaaatatagttccgtttggaccttcatttccaggacaaaaaggaatagctcataatcctgatgaatacatggatatagaagatataatattaaatgcaaagatatttgcaaatgcaatatatgaattagcaaaggagtagttatgttagaaataataggaatgtcagtagaagacgctaaaattatagaagattgtggtgcagatagaatagagttagttagtgctttaactgaaggtggattgacaccaagttttggtcttatagaaagtgttgttaacagtgtaaagatacctgtgaacgtaatgataagacatcatgcgaaaagttttgtatacagtaaagaagatataagtataatgcaaaaagatataggtgtggttaaagagattggtgctaatggagttgtatttggtgtattggataaaaacaataatatagatgagaaaaatctaaatgttttattgaaatgttgtgataatcttgatgttacatttcatagagccatagatgaatcaaatacaatagatagtgttaaaattttgaaggattatgataaaattacgaatatattaacatcaggagggaaaggaagtatagttgataacatacaaatgataaagaatatgatgcttagttctaatcacataaaaattcttttaggaggaggtcttaattttaataatatagaaaagataaaggaattaactaaagcaagtaattttcattttggtacagcgattagaataaataacagtccttttgaagatatagatagacaaaagcttaaacaactcgtaaatataatttcaagatagtatatgaatataaaatacttagtttaaataaagagagtaagttaattataatttgggtatatgaatgttaataggtattaaatatgaaattattgttgagtatgctttataacttttaagtagttttaaatataaataatgaaagaaaagatagattatggaggttttagagggtttatagttattaaaaaattataaaggtatattggcatataatacacataatttcctaaaattaccatcttatgacatgaattcacatattaataaacaattaatggagatttttgtggatagaaataggagtaaaaatagctttaaataaacaaaaacaagagttattaacagttttatccacattatccacaggtgtttgtaataatattaatccacataagtatcaatgtaactaaaaatgataaataattctatcaattgaatagaaaaaatcataaaagtaaataataaaaagaggattatgagagttcgtgtagaatatattattaaagtataaattttcttatactgacataattgaagggagatgtatttatgaacataattatatctggaaaacaaatcgaattaactgatgcaataaaaaataaaatcgaaactaaactaagtaagttagataattacattcatccagacactgatgtaaaagttacagtaagtgcgagaaaagcaagacaaaaaatagaagtaacaatagctactgtaaatggtcctataattagagcagaagatatgcaggaaaatttatacacagctatagatgttgtatatgataaattaagtaaacaattaaaaaaatataaaaagagattacaagataaacataaagacaacaagagtataagattccaagattcagagataaatctagctgatgaacaagaggattatggggatgaaaatcaagaattagtaattcaaagacgtaagaaatttagtgttaagccaatgagtgaagaagaagctgtattacagatggaattaataggacatgatttttatatgttcaagaacatagattcagatgaaatagcagtagtttataagcgtaataatggtggatatggtataatagaacatgaataaagcaatttagatttaatcatattagctatcgataaataaattatcgatagctttttaaattaatattaaaagtatagtttttatggtaaaatgaataatagtacaataaagaacgaggagagatgtaaaatatgagctttatggataatttattcaacatggcagataaaaaagaattaaaaaagttcaataaaactgttgatataatagattcattagaacctaaatttgaatctatggcagactcggaacttaaaaatatgacaaatatatttaaagaaagattagcaaatggtgaaagtatagatgatatacttccagaagcttttgcagtagttagagaagtttctaagagagtgttaggacttagacactacagagttcaaatgattggaggtatagtactacatcaaggaagaatagcagaaatgaaaacaggtgaaggtaaaactttggttgcaactgctcctgtttatttgaatgcgcttactggaaaaggtgtacatgttgtaacagtaaatgattaccttgcaaaacgtgatagagaccaaatggcaaaaatctatgagtttttaggaatgagtgtaggcgttattatacacggtcaaaatccaaaagttagaaaagaacaatatgattgtgatataacttatggtacaaataatgaatatggatttgactatctaaaggacaatatggtaatacacaaagagcaaagagttcaaagaggattaaattatgctatagtggatgaggttgactctatactaatagatgaggctagaacaccacttatcatatctggacctggagacaaatcaactcacttatattcagatgcaaacacatttgttttaaccttaaaaccagatgattatgaattagaagaaaaagataaggctgtatctctaacagcatcgggtatacaaaaagcagaagtgtattttaatgttgataatataacagatatatctcatacagaattataccatcatataaatcaagctttaagagcacatgtaataatgaagaaagatgttgattatgttgctaaagatggagaaatagtaatagtagatgagtttacaggtagacttatgtttggtagaagatattcagaaggtttacatcaagcaatagaggctaaagaaggtcttaaaatacaaagagaatctaaaacactagctactgtaacattccaaaactactttagaatgtataaaaaactttctggtatgactggtacagcaaaaacagaagaagaagagtttaaagcaatttataaaatggacgttttccaagtacctaccaataagcttatggtaagagaagatttaccagattctgtatacaaaagtgaaataggtaaatttaatgctgtagcacaagaaataattgaaagacataaagttaatcagccaatacttgtaggtacagtatcgatagaaaaatcagaattattatcacaaatattaaagaaaaaaggcattaaacatgaagtattaaatgctaagcatcatgataaagaggcagagataatagcacaggctggtagattaggcgctgttacaatagctacaaatatggctggccgtggtacagatatagttttaggtggaaacccagatttcttaactaagagagaaatgagaagaaatggatttaaagaggaaatagtaaatagggtagatactccaatagaaggtatacctgtaaaaggtaatgaaattctatttgaagctagagaagagtatgaaaaactatttgaaaagtttaagcaacaaacacaagaagaacaaaaacaagttgtagaagcaggtggacttgctataataggtacagaaagacacgaatctcgaagaatagataaccagttgagaggtcgtgctggtcgtcaaggtgacccagggagttcaagattctatataggtcttgatgatgaccttatgagattgtttggtagtgatagaatatctggtattgtagataaaataggtcttgaagaagacatgccgatagaacatagaatattatctaagtctattgaaggagcacaaaagaaagtcgaaggtaaaaactttggaataagaaagcatgtacttcaatatgatgatgttatgaataaacaaagagaaataatatatgcagagagaaaacgtgtattagaaggtgaagatttacaagaacaaatacaatcaatgactcattctataatagaagaagcagttactctttatacacaagataaaggatttgatgaagaaggattcaaagaacatatgtataatctgttcttgccaaaaggtagcatagaaataccagaaatagaaaaacttaatccagttgaaataacagaaaaagtttatgaaatagctatgaagatatatacttcaaaagaagaacaagttggctatgagagaatgagagaagttgagagagtaatcttacttcaagctgttgataaccattggatagaccatatagatgctatggaccaattacgccaaggtattggtcttcgtgctgtaggtcagcaagacccagttattgcttataaaatggaaggttttgatatgtttgatgaaatgaataaacatatcaaagaagacactgtaagatatttatttaatataacaatagaaactccagtggaaagaaaagcagttgtagatgttgaaaatctatcttctccatcagatggaacacttccaacaagtaaaactgttaaaaaagatgaaaaggttggaagaaatgacttatgcccttgtggaagtggtaaaaaatataaaaactgttgtggaagataatctcggaggattaaatgttaaagttacaagagtatagacatagtatggagcagatggcttcaaatttagaagaattgagggtttctctttgacatagcttcattgatgaaaaatatacaaattaatgaagaaaagatgaatcaacaagacttttggaatgataatgaagtcgctcaaagagtacttcaagaaaataaatctttaaaagagacattagaagaatatgaaagcttaaaaagcttattagaagatatagaagtattaattgaaataggtttagaagaagatgatgattctgtagaaagagatatagaaaagtccatagaatcaatggaagaaaaattatctgaaatgaaaataaagactcttctaaatggagagtatgataaaaataatgctatattatctataaatgctggtactggtggcttagatgctcaagattgggctcaaatgcttttgagaatgtatataagatggtcagaaagtaagggttataaagttaagcttttagatataatatcagaccctgaagcagggataaagacagctacaattcttgtagaaggaacaaatgcttatgggtatttaaagagtgaaaaaggagttcatagattagtgagaatatctccatttgacccatcagggaaaagacatacttcatttgcatctatagatgtaacaccagagttagatgaaaatatagaagtagaaattaatccgtcagatttaaagatagacacatatagagcttctggagctggagggcaacatgtaaatactactgattcagcagttagaataacacatatccctactggtgtagtagttcagtgccaaaatgaaaggtctcagcatctaaataaggacagagctatgagacttttaatggcgaaattgatagaattaaaagagttagagcaaaaggaaaaaatagaagatatacaaggcaaatactcacaaataacttggggtagtcaaattaggtcatatgtttttcaaccatataaattggttaaggaccatagaacaaatgctgagtttggaaatgtagatagtgtaatgaatggaaatatagacttgtttattaatgaatacttaaaaatgaataaaatagtttaataaatatgcactgtaattaagatatatgtataagaaggttagtgcttaatatgcacttacagcacttaggctgaggacgataaccctcagccttcgttctgttttgttatacttatgaaaaactaacattaggagtgaataaattggatataaatcaaatcttaaaaaaagagtttaatcttagagatgaacaaataaataatacattaaaacttattgatgaaggaaatacaataccatttatagctagatatagaaaagaaatgactggcgaaatgagtgatgttacactaagagaattttatgaaaaattaatgtatttgagaaatcttcaaagtagaaaagatgatgtagttagactaatagatgaacaagggaaattaacagatgaaataacacaaaatatagaaaaagcaaaaacattacaagaagtagaagatatatatgctccatataaacaaaagaaaagaactagagcaacaatagcaaaagaaaaaggattagaaaatttagcattgtcaatactagagaataatttagataatatagaaatagaggcaaagaattatcttgatgaagagaaagaagttctttctattgaagatgctctaaaaggtgctagagatataattgcagaactagtctcagatgatgctaagattagaaagtatataagagaattagctttaagagaaggtatgatagttagcaaaagtgctactgatgagaaatcggtttatgatatgtattatgattataacgaagcagtaaaaagtatggctccacatagagttttggcaataaacagaggagaaaaagaaagcttcctaaaggttaagttagaaataaataatgataaagttttaaattacataataaacgaatatgtaaatgataaaaatttcaaaaataaagaagaaatcgtaagttcaatagaagattcttataaaagattaattttcccatcaatagaaagagaaataagaaatcatttaacagaaatagctcaagaaagagctataagtgtatttggaaagaatgttaaaagtttattgcttcaaccaccagttaaagacaaagtagttatgggatttgaccctgcatttagaactggatgtaaaatagctgtagtagataaaaatggtaaactactagattatacaacagtatatccaacagaccctcaaaatgatgtagagggagcaaagaaagttttaaaaggattgattgaaaaatacgatatagatataatttcaattggaaatggtactgcatctagagaatcagaaacttttgtatcagaaatgataaaagaaatagatagcgaagtgcagtatgtgatagttagtgaagcaggagcatctgtttattcagcatctgaacttgcaaatgaggaacatccagatataaatgtatcaataagaggagctatatctatagctagaagattacaagacccattagcagagcttgtaaaaatagaccctaaaagtattggtgttggtcaatatcagcatgatttaaacaaaaagagattagaagaagtgctagatggagttgttgaagattctgtaaatagtgttggagtagatttaaataccgcatcatactccctactagaacatgttgcaggaataagtaaagctatagcaaaaaatataatagcatatagagaagaaaatggagattttacatcaagagcacaattgaaaaaagtaaaaagactaggacctcaagcatttactcaatgtgctggatttatgagaatcttagagggtaaaaatccactagataatacaggtgtgcatcctgaaagttatgatatatgtaaaaaaatgattgagataattggatattctttagatgatgtaaagaataagaatataggtgaaatagatgaaaaaataaaagaaattggcttgagggaattaagtgaaaaactggaagtaggacaagttacgttaaaagatatcatagctgaaatcaaaaaaccaggaagagacccaagagaagaaggtataaaacctatacttagaactgatgtcttaaaaattgaagatatacaagagggtatgactttaaaaggtacaataagaaatgttgtagactttggtgcatttgtagatattggaataaaaaatgacggattagttcataaatcagaaatgagtaatagttttgtgaaagaccctatgagtattgttacagtaggtgatatagtagatgtaaaagtcattggaattgacttaaacaaaaaaagagttgccttatcaatgaaaaaatagataagtttatgtatggttatagtacttaaattctatatttgtaaatgagattactcgagtgtataaatgttaaaaatttgtaaaagtatatagtaagaaaatatattaaaataagaacgatagtcttgaaaatcaggaggaaaatgaatgatttttataaaaaatggtaaaataaataccataacaaatgggataattcatggagatatacttatagatgaaggaaaaataatagaaattggagaagatttgatagctcctttagatgtagaggtaatagatgctagtaataaacttgtgtttcctggatttatagatgctcatactcacttaggtttatgggaagatggtatagggtttgaaggagcagatggaaatgaagagactgacccaataacaccacaattaaatcctatagatggaattaatccaatggatagaacttttaaagaagcttttgaaggtggaataacttctgtttgtacaacccctggaagtgcaaatgttatgggtggtcaatgtatagctataaagacatgtggaaaaagaattgataaaatggtaataaaaaatccagttgcatctaaaattgcttttggagaaaatccaaagagctgttatggtcaggatgataaatctcctcaaactagaatggctatagctgctttacttagagaaaacctaaaaaaagcagaagaatatttagaggatattgatatgtatgagagtcatgatgatgaagactgtgaaaaacctgaatatgatataaaaatggaaagtttaataccagttttaagaagagaaattccttttaaggcacatgctcatagagcagatgatatgtttacagcaataagaattgcaaaagaatttaatttaaagcttacattagaccattgtacagaaggtcatcttattgtagatgaattagtggaagaagggtttcctgtaatagtagggccatctttgtcagaaaggtctaaatttgagcttagaaatttgacatttaatacagcaggaatactttcaaatgcaggtcttgatgtatgtataatgacagaccatccagtaataccagttcaatatcttccaatatgtgcaggtattgcagtaaaacatggtatgaaagaagaaaaagcaatagaatcaattacgataaatccagctaagactttaggaatagaagatagagtaggctctatagaagttggtaaagatgcagacctagtaatttgggataattctccactagagattcaaagtaatgtactttacactataataaatggcaaagtagtgtatgagaaaaaataacttgacaattattaaaaaattaactaatataagagtgtaaggaaaattaaaaaatcaaagaagatcttcggggcagggtgaaattccctaccggcggtatagcccgcgaactacttaggtggttgatttggtgagattccaaagccgacagtaaagtctggatgagagaagatatttatggaagataaataagtttattttagtttgtttaaactatatccataaaaactcgaagatagggtcttcgagttttttgtttttcctaaaaaatataaacatattgattagggggaaaataattatgcaaaacacagcaaaaagaggcaatatgatttcaacaagaactttagtagtaatgtcaattttatctgcaatatcttatttattaatgtttattcaagcaccaataccaggtatatttccagatttcttaaaaattgacttatcagatattccagcaatattcggaggaatgtctctaggaccattagttggatttggaatagttgtagtaaaaaatgtgttacaagcaataacagcaacaacaactggaggaataggagaatttgcaaatatattaattggtggttcttatgtaatgatactttgttattcatataagagaagtggagatttaaaaggtgtactgattggttttgtattaggaacaatatctatgactataattggttcattagtaaattattttgtaatgttgccactttatggtcaacttatgggactagatgctataataggtttaggttcagctataaatcctcaagttcatgatttattcacttttgtaatttggatgatagctccatttaatgtgctgaaggctgttataatatctttagtaacattgccactttataaaaaaatgggaaatataataaagaaataattagacaagaaaatataaaattaaatgtattgaatagccataatttatttataacttcagtcctatattgtgattgatatattaaatatattatggctttattaatttatcaaaaaatgtatataaaataagaaatatttagacaaatttaaattttaaaataaaggaagaattaaaacgattaactattaaaatatgaaaaaggtatctacaatatacagagcgaatttataataaacaaaaaataaagttattattaaaaaactataaagactaataatcaaacttttaataataactaatttaataatgataggggtgtatattcatgcatttatctaaaaaaataaaaaaattatttttagatgataaagggtattattttaatagtaattgggaagatattcatattggtatttatgatacaaaattaggagattctttaaagtatatcactaatgaatatattgaaaatatggaaagggtaaaatacgattatcgtgaattaaaaaatatagaaaatcaaactgatggtatgtgtattttagcaataaggcagaattacaaggcattagagtatgtaaaaaatcaaaccgaagaattatgtttagaggcaataaagtataattataaagcacttgaatatgtaaaagaacaaacagaatacttgtgtcttgaagctataaaaaaagattgtaatgcacttaagtatgtacgaaataaaacagaagggcttattataaaagcaataagtcattcttccaatatagatgttgtaagtatactaaaggctttagagactcaaacaagaaggatatgtttagaagcaattaaaaaagatggcaggtgtcttgcatacgttagagaacagagtgaagaattatgtatagaggccattaagcaaaattataaagcattaaaatatgtaaaaaatcaaacggaaaaaatgtgtatagaatccgtaagacaaaatggtatggcattacaatatgtaaataaacaaactgataaaatatgtatagaagctgtcaaacaagatggaagaagtctacaatttgtcaacaataagacagaagaaatatgtataaatgctataagatatttaaataaaaaatataatattaaagatgtactaagttacatagataagtatacagaagatatatgtatagagattgtaagacaaaatggaaaaatgcttatgtatataaaaaatcaaacagaaaaaatgtgtattgaagcagtaaaagagaactataagtctcttaagtatgtaaaagagcaatctgagagaatatgtaaagaagcattgaagcaaaaccataaagcaaaagagtatgtaaaaattgctattgatgattgtatataaggtgtagatacagccatcaatagtgaaagataaaaaaagataaagacaagtactttataataatctaggcttatactataattaattaagcagtgatataaattcacatgacgattatatcaaaatggagatgaattgatggcaaaaatatatttagaaaatgaaaataaaactagagaaataggatataaattaggtaaacttttaaaagaaggcagtgttatctgtttagtaggagatttaggagctggtaaaactacaatgacacaaagcttggcagattcattagggatagaagattatataacaagtcctacttttactataataaatgaatatgaaggaaaaatacctttgtatcattttgatgtttatagaataggtagtagtgatgaaatgtatgatattggttatgatgaatatgtaaattcaaatggaatctgtataatagaatgggctaatctaatagaagatatacttccaaaagaatatttgaatatagaattgagatataaagatgaaggaagagaaatgatattaactccaaaaggagagttttataaagagatagttgaggagttgattaaataatgaaaatactaggtatggatacgtcttctatggcagcaagtgtagcagttgttgaagatgataacttaatatgtgagtttacagtaaacaacaaaaaaactcattcacaaaagcttatgccaatgatagaaaatatgttgagtatgagtgatttaagtataaaagatatggatttattagctgtatgtataggtccaggttcgtttacaggacttagaataggtatggctacagtaaaagctatggcccatgtaaataatataccaataatagcagtaaattctttggaatctctagcaaataacataaatttctgtgatagaaagatatgttgtatattagatgcgcagaaaaatcaagtttattcagctaaatacaagtttgaaaatggagagatgatagaattagatggtgttgatgttgtagagtttgatgctttagtagatgaaattgtatcaactaatgaagaatttataatagttggagaagctgtatacaaatataaagacaagttagagaatataaaaaatataaaaataccttcaccagctaataatgtatctaacgcaggaagcttatgctctttagcattaaataaatataataaaaatatagatgtacatacttgttatacgataaatcctatgtatatcagaaaatctcaagctgaagtacaatatgatgaaaaaatgaagaggctaaataatggaagataatacaaaactaatagtagatgatataaaaatagaagaaatgactacagaagatatagatgaagtttttgaagtagaaaaaaattgttttgaagattattggtcaaaagagtcttttagaaaagagttgtctaatgaagtagcaaggtatatagtagctaagttaaatggaaaaattgtcggatatgtgggaatttggcttatacttgatgaagggcatataaataatgtggctgttcatagtgactatagagggaaaaaaataggggacaagttgataaaatgcatagttgatttatgtaaagataataatattgcatctatgacattagaagttagagcatcaaataaaatagcacaaaatttatatagaaaatatggatttaaaatgggtggaataagaaaagaatactacagtgataataaagaagatgcaattataatgtggaaccaattaaaagaggtgtagagtttatgagtgatataataacattagctatagagagtagttgtgacgaaacagctgcatcagttttaaaaaatggtagagaagtactttcaaacataatctctactcaaatcgagacacataaaaaatttggtggtgtagttccagaagtggcctcaagaaaacatgtggaaaatattgatatagttgttcaagaagctttagacaaagcaaatataggttttaatgatatagaccatatcgcagttacatatggacctgggctagtaggtgctttattggttggtctatcttatgctaaagcacttgcatatactttgaatattccacttgtaggagtaaatcatatagaagggcatctaagtgcaaactatatagagcataaggatttaaaacctccttttataacattaatagtatctggaggtcatactcacttggttgaagtaaaagattatggcaagtatgaaattttaggaaaaacaagagatgatgcatctggagaagcatttgataagatttcaagagctatgaatttaggctatccaggaggtcctattattgataatctggccaagaatggaaataaacatgctatagaatttccaagagcctatttagaagaagatagctatgattttagttttagtggattaaaatcttctgtattaaattatctaaatggaaaaagaatgaaaaatgaagaaatagtagttgaagatgtagcagcatctttccaagaggctgtagtagaggttttatctaataaagcactaaaagcagtaaaagacaaaggatacaatatcataactctttctggtggggttgcttctaattcggggcttagagctaaaataacagagcttgctaaagacaatggtattactgttaagtatcctcctctaattttatgcacagataatgcagctatgatagggtgtgcaggatattataattttataaatgggaaaacgcatgatatgagtttaaatgcagttccaaatttaaagataaatcagtagagttagatgaatttgtaaatataaaagtattgtttcaaaaaagtaagtagaagtgaaattaaatataataaaaataaatatagtatatattaaaacttgaagtaaaactatttataatctttatattccaatgaattgcaacaaattttaggatatacagattgtctttggcttagatttgcttcaagtttaattttttctatagaaagattattttaaaaagtgggtaatatacccttttttttcattcttaaaaagttttatactaattatagaaagattaaggaggggaagaaatgagtcaaagtaaagaagacaaaataagaagtattttggaagcaaaaaatattaaatcaaattttcaaaataaagaaaatttaagtgaatttaatgaaaaaaaagcaagtaaaagagcagaagacttattagatgtatattataatacattatctactgctgatatggaatttccatattggtataatagagaatatagaaaatcagatggtgatataccagtagttagaagagctaaagctcttaaagctgctttttcacatatgacaccaaatataatacctggtgagaaaatagtaatgcaaaagacacgccattatagaggttcttttccaatgccatgggtaagtgaaagtttctttgttgctcaaggagaacaaatgagagaagaggcaaagaaattagccagtaacacagctgatgaacttacaaaatttgggtctggtggaggaaatgttactgaaagttttggaaatgtcgtttcaatagctggtaaattcggaatgagaaaagaagaagtacctgtacttgtaaaaatggcaaaggaatgggttggaaagtctgttgaagatttaggttttcactatgaaaaaatgatgccagattatgatttaaaagaaaacctaatgagtacacttatatgcatgtttgattcagggtatacacttcctcaaggtagagaagttataaattatttttatcctttaaattatggattagatggaattatagaaatggcaaaagaatgtaaaaaggcagttgcaggaaatgcatctggagatgggcttattggtatggaccgtctatatttttatgaggctgttattcaagttattgaaggattacaaacttggattttaaattatgcaaaacatgcaaaatatttagaaagtatagagacagatttagaagctaaaaaagaatactcagatttagtggagatattagaacatattgcacataaacaacctcgtacatttagggaagctcttcagttgacttatacaattcatatagcatcagtaaatgaggatgctatatctggtatgtctataggacgttttggtcaaattttatatccttggtatgaacaagatatagaaaaaggactaattacaaaagaagaggttatcgaattattagagctttatagaataaaaatcacttgtattgactgttttgcttcagcgggcgtaaatggaggagtactatcaggtaatacatttaatactttatctataggtggattaaaagaagatggttctacaggagctaatgaactagaagagttattattagaagcaagtatgagatgtagaactcctcaacctagtttaactatgctatatgatgaaaagcttccagaagatttcttaatgaaagctgctgaatgtacaaagcttggttctggttatccagcctgggtaaacaactcaaatggaacaacatttatgatgaaacaatttgctgatgaaggtatgactgttgaagaagcaagagcatttgcattaggtggatgtttggaaacgtctccagggtgttggaaacagttaactttaaacggaaaaacgtactctattgcaggtggagcaggtcaatctgctggctctggagttcactttatagctaatcccaaaattttagaacttgttcttatgaatggtaaagaccatcgtatgaatatacaagtatttgagcctcataataagccattagatacttatgaagaagtcatagaagtatttaaagattattataaacaagcaataaatgttttagaaagagcaaataacattgagttagatatatggagaaaatttgatacttctataataaattcactactaaagccagactgtttagacaaaggtcaacatataggaaatatgggatatcgttataatgcaacattaaacgtagaaacttgtggtactgttactatggtcaattcatttgcagcacttaagaaacttgtatatgatgacaaagcatttacaatagaggaaatgaaggatgcaatattaaataattttggatttaaagatgcattagaagtaggaaattattctatggcagaccaagtaaaagtagataagactggtaaatatgatgctatttacaaggcctgtcttgatgcacctaaatatggaaataatgatttgtatgcagataatattcttaaaaactatgaggtatggttatcaaaagtatgtgaagaagcacaatctttatatgctaagaagatgtacccttgccaaatatctgtttctacacatggaccacagggagctgctaccttggctactccagatggtagactaagtggaacaacatattcagatggttcagtctctgcatatgcaggaacagataaaaatggagtatatgcattatttgaatctgcaactatttgggaccaagcagtagttcaaaattctcagatgaatttaaaacttcatccaactactataaaaggacaacaaggaactaaaaaattattagatttaacaagaagttatttaagaaaaggtgggttccatattcaatataatgttgtagattcagaaacattaaaagatgcacaaaaaaatcctgacaattatcgtcaattaatggtacgtgttgctgggtttactcaatattggtgtgaattaggtaaaccaatacaagatgaagtaattgctagaacagagtatgaaggggtgtaaaatatgagaaagcatagtgattgtatgaatttttgtgcagtagatgcaaccaaaggaatttgtagattatcaaaacaaatgattaatttagatgattcagcatgtccagagataaaagtaatgccaaaatgtaaaaattgtaaaaattttgttgaagctaatgatgaaggtataggcaaatgtgttggcctagagaaagaagactgggtatattcaacattgaatgcaattacttgtgaaggacatgtgtttaatgagtagtcaaaagcaattagaaggcatgattttcgatgtacaaagcttttcagttcatgatggtccaggttgtagaacaactgtatttttaaatggatgtccactgagttgtaaatggtgtgcaaatccagaaagttggactgtaagaccacatatgatgtttagtgaattatcttgtcaatatgaaaatggatgtactgtatgtcatggtaagtgtaaaaatggtgcattgagctttaatcttgataataagccagttatagattggaacatctgtaaggactgtgaaagttttgaatgcgtcaactcatgttattataatgcgtttaaattatgtgcaaaaccttatactgtagatgaacttgtgcaggtaattaaacgtgattctaacaattggagaagtaatggaggagtaacatttagtggaggtgagccactacttcagcatgaatttttacatgaagtattattaaagtgtcatgaggtaaatatacacactgccattgaaacaagtgcatgtgtatcaaatgaagtttttaataaaatatttaaagatattgattttgcatttattgatataaagcatatggatagagaaaaacacaaagaacaaacaggtgtatataatgatttaatattagaaaatatatcaaaccttgcaaattctgactggaatggaaggttagtacttagagtaccagttatctctgggtttaatgatagtgctgaaaatataagtgatattatatcttttatgcacaaaaataatttaatagagattaacttattaccatttcataggctaggagaatcaaagtggattcaattaggtaaggagtatgagtattctgataagggagatattgatgaagagcatcttgaagaattacaagatatatttttggataatggtatagcttgctatgttggtcatgagacagctttttaaaatcaaatacaagtttttttaattaaaaaaggatgttacactaaaagctagagttacatccttttttatgtggtttttatgtagaaataattaagtaaagttttatatgttttatatattgttcatattgctttatgtccataaatattactttaaatttatactttatatattttttatagtttaaattacagttagagaatatattacgtttactttattgaagcagaagttttgtggtaaaatactactatgaagaaatttaatagaatatattttagaaacaactaaaaataatagttaggaggaagacatctatatgaacaaatcatggagtaacttgattattaagaataaagacaaaaaagtacgttcagggtggattattataactgttatggctgccttttacatatttgagtattatttaagcactatacttatggaaataataagaaaaattctgattgctacaggtgacattaatttaaaaacaaactatttttcggaatatgctaattggttaaatgacgttgggttacaggttgtatttcaaattctaacagattcacttatgattattattcctataattgtatggagatttattatgaaaaatcctattagtgaaatgggattacattcttatagaattaagaaaaaagaaggatatgtaggaatgttattaggaatatttaattgtacagtaatctttattataacaataacaattggtggtggtcatgttacttcatgggtaccaaaaatttcacctttaacagtttcttggatacttgtctttattttagttgcttttgcagaagaaattttaaatcgtggtttttttatggcagttttacgaagatgtaaaaatatttattttataatgattgttccatctgttatttttgggttgattcatatatggaatcctgatgttacttttttgtctgtaattaatattataattattgggattcttttttcatatatgtttataaagtcgtcgaatatatggatgtgtataggttatcattttacatggaatgtatttcaggggattatatatggtatgcctgtaagtggacttcaggttccagggattataactacacaaatcactcatggtaatctattaaatggagggatgtttggtattgaaggtggaattttgactacttttgttaatctacttagctttatatttgtatggtattactatagagattctaagtatgattttgttagtgataaagtaaatgtgactaatatcaagaattagttgattataataaattttaataatatcttctaaacttaaagtattctgtaggattgttggaaatttacaaaaatataaaaataacttggatattctatttactccaagttatttttatattcttttgtaaatagaaatggaacataaaaaattaaaacaaccatagatactattagtatatcatggtaagtgatagttgattctttagaatttgtgataagaaaagcactattatttaaaacatgaattatagcacaaaaccagatattcttagtttttatataaagatatcctaaaaatattgaaattccaactatatgtattgaacgtaatattactcctaatattggcgcttcaggtgtatataatgtaaatattagtggtaagtgccacaagctccaacacatacctaatattatgactcctaattttttaccaaatttatcaaaaaaaatattctgtaaaaaacctctccaggcatattcttcactaaaaaaaatataaatagtagttaatgatgttattggagtaaatataaattttatgataccactataattaggttgagccccttgtagtattagtataaatgatgttggaacaattacagaaatcataaagtaaataattaataaagaacctagtttaatattttttacaggatataaattttttttatttgatgaatatattataattgataagctacttataaaagttaatattaggtttataattataaattcattattatttattagatttaataacttaagaacaattaataatgaataaataagaaaaaataatatgattagtgaataaaattcatacatatcattatttaatccttcagtataaaactttgcaatagcaactgaagatagaggtaatatcatcatgaatgatgcaaagttttctggatcaataaatttattataatataacagtaaacctaatgaataagttaaaccaaagtttataaagaaaaagataataatttgtattttttttctttttatttcatttttaataaatactgggtttagaatatttatccatattaattttaagttcattaatttaatactcctttacaatatagattcttaactaaattaaaatattttattgaatattataaattcatgacagtcaatattattgaaaagtaacttataaaattatatataaataataaaattaattttactatatacccatatatttagttatattgcaggcagaatgtggtttaccataagcaaaaggacaataaaaaatatttttctatatttttattatctttttgtaaaagatttattatttattgcattaaattaataggcagtagaggcatagttgataaaattaatgaagaaattaaacttatgaatataaatttattattgagttttaatattacatttattattctctttgattttaatattgtatatttaataattattacattcgtctggttaataaataataattaaataaatcaaatgattttaatttactatatgattataatataacgttgattttttatgatttcaataatttcctatatacaaaataatacaaaaaatttattaaaaagttagtttattattttatttataaaaattaggatgaatttgtaatgttaatatcaaaaaaataaatataaatatcaaaaataaatttatttaaaattaaaattttatttattattaaagagtaaatataattattagtaatatatatagtatttgtaataaaatatcaataattagaaagattatgaaaactaaattagaagaactaaaaactatatttttattaattataatatttgaataatctttttaatcatataaaatgcatatacttgtaatatttaaaggtgatattaatattattagtgtatattaatattcccttgaaattaaaaaaacatagatatttcagtaatctaaaatagtctacaaaaataacagttttagcaaaattaataagaatacatatagatttaaacctaaaagtatgaacatgtctgttttttacaagattaaaatttatattatatgataaaattaacttaactatttcaataagacttataatttttttctttatactagaccttattgaaacctttatagtttaattctaattatatattataaataaagtatgtgtatattaaggaggtaatatgaagtttttaaatgttttaatagtagttgaagatattgagaaatcaaaaaagttttattatgatattttggggttaaaggtaatctgtgattttggagaaaatgttgtattagaaggtaatatatcattacaagaaaaaaagctttggttagaatttattaataagagtgacagtgaagttaagttcaatggaaatgatgctgagttatattttgaggaagataattttgatacttttgttgaaagattgagtacaatgaaaggtatagattatgttcatctagctatagagcataggtggggtcaaagagcaattagattttatgatttagatgggcatattattgagattggagaaactatgtcatctgtgtgtagacgttttttagatagtggtctttcaatagatgaggtagctaaaagaatggatgtaactgtcgaatatattgaatcagttttagaatagatggattatattaaagtaaaactatattttgtatagaagtaagggctgtaagtaaacttgtatggaaacaaatttacttacagtttttgtttttgtaagatacagaatataatatttgttataattttatttggatttttaaaaagtgcatgattttccttacatattataatagaatttaatatttattggatgatttaaatttagaaaaatataagtattagcttataaaagataattatacttactatcaagctgtagaatcatatatactattttatgtaattatgttaaaatttaattgaacaaattaaaaatatagtgaaaattgtagttttagtttatttatttaataaatatttcaaataaaataatgtttaaataagaaacataaataataatattattattgttcttaaagacaaaaaatcttagcttaaaaatttgtatcatataaaatccctacatattatggaagtaatgatacattatatgatatacacaataaagtataaaagtatttacatgttttttctatatattttataagttttaggtatggaaaattactaaataaaaattagattaatgattatgatagtatagataaagtttattctttttattaatagaaattgttgtataaaaataataaaagtgaggagagtgatatttaaataaaaaaattttaataagtattggtaatatagtttttagggatgattattttatgtaaaaagttgttatttgtaaagataaatatagaaaatattataagtattgatttagtgataatctaaaaggtgagaattgtaataaaaagagaacatatccttcaaatggatgtaaacttataaataacattattacaagagatttattatacatatactgcaactattaattagaatttatactgtatttgtatttaaataaaaacacaaataatattattgtaaaaatttataattattaaatatttaaagtataagatataataattataagtaatttatgtataaatgtataaaatatagatatatttagattaaataataattattattatacaaaaattttgtattaaaaaatatctttaaatttgaaatataataaatgttagatagaattttataaaatttaaaataaaaaattatataaggggtgtaatatgattaatattattatttgcgaaggtaaaaaatcagagagggtaattctaaatgattatataaatacctttttttataattacaattttgaatacaatatcaaagagtttgaaaatggaggcgatttattaaaaaagtatcctaataatgttgatatcatatttatggatatagacttaaatgatgaaaatggatttaatgtttcaaaagaaatcaaaaaatttgatgaaagtgtaagaattatatttgtatcctcatcaaataaatacataaagaaaggttatgagataggagtttatagatatttagagaagcccttaaaatactctctatttaaagaagcaatatcatcatatttaaaagaatgctacaaaaatgaagctattttatctataaaatgtaaatgcaagatatatttcataaaggtagatgatattttatatttagaagttttaaaaaatgatttaactatacatactgaaaaaggaatatatacttttaagaatagtatgaaagaaatagaatcaaatctagaagaacataatttttttagatgtcataaaagctaccttataaatttaatgaaggtaaatatgctagatatagaaaataatattgtatttataaatcaaaattcaataattgtaagtcgttataagataaaattattgagagaaaagttaaatagttgtttggtagatgtaataatttgaggtaaatttttgcccttatattctattctaatagaatatatctattgtaaaatatgaaaaaatttataataaaaactaattatagttaaaaatatacctttcatcaataacagattgaatatattaagattttattttacaattctattaacaattttattttaaagatttaatttaaaatttaaatatgtattatacataataaaataatgttatattatattaattaataaaatattttatttcaattttattaagtatggaggtgtattgtggaaaatggtaaatttcaattttttaaaggtgtaagaaattgttttaatatgatttatctacatgataaaagatatttatttatctctatgtttatggcaatttttcaggggattgttccatctatttctttgttagtaagtcaaaatatcattaataatatgcaaacattttcgaaaagtgtaaaagaaatattagttttgttaattatgtatttaatcataaatataattccttcaatttttcaaagtttttatggatattatagaataaagtttaataaaaattttgaaaaacatattgaaacaatgatgttagagaaatctttaactttgagtttaaaagattttgaggatgataatacttatgacatgataaatagagctcaatctcaaaaaggatttaatattactatactatctgaaaaccttatttcaataataagagaatcagtatctacactttctcttattgttgtattatcacaatttcaactttggctaataatagttgttattgttattcctgtattgaaatcattatattccattaaattaggaaaggaacaatatgatgttagtgtaaacagaacttggaaagaaagaaaggcctggtacatagattatttgttgtcaaaaggttatgcttacaaagagattatggtatttagaattggttctaaacttattaatcattataaaaaattaaaagaggatattatatctcaagatatgaatatagctaaaaagaattttattgctacgctattatgtacagttttagattcaattgtatctgcaggaattataggatttataataattcaaggtattttaaagaagattttaataggagatgcgactacatatatacaagcagttcaatctataaaggataatgttgaatcaatattttcgttatttagttcagtaatacaagatcttttttatacagatttactgtttaaatttctagattataactgtaaagaagactcaattgaacatataaaaatatttgaaaaaataggggatataaataaaatagagttaataaatatttcatataaatacaatcattcatcagagtattctttaaaaaatattaatttaactttaaataaaaatgatcctattgctatactaggaaaaaatggttcaggtaaaacgacacttttaaaaatattattaggtttttatgatgattatgaaggtgacatcttgataaatggaaaaaatttaaaggatattgaaaaagatgaatacattagaaaagtaagttgtatgtttcaagattatattaaatatgaggctacattaaaagaaaatgtcgccatgggagatgtatataagagtaacttggaagaaaaagttaaaagtaaacttaaagaaactaaattgaaaccaagtatttatgaggaagatggattagaaactattttaggaacctggtttggtaagaagcaactttctatgggtgaatggcaaaaagtagcaatatctagaactcttatgaaagatgctgatatgtacatttttgatgaaccagattcatctttagattctgaagcgggaaatgaactcctttctttatataaaaaaacatttgaaaataagattggaatatttataacgcaccatatccaacatgcaaaaaagataactaacaatattgtagttcttgaaaatggaaagttgttagaaagtggaagacatgatgaacttatggacaaaaagggtgtttattttaatttattttgtaactgcaaataaatattaaagggaggttaattaatgaatcaaaaaccatttatacacacatttaaagctggaaaatcatattttatttatgatgttaatacggataagattttaaaggtaaatgctgctgtttataattatctaaataaaattgagcataatttagaaaaagaaagtgactggaacatagaaatagaagacgaaattaataccttgattaattatggatttctaaaaaataaaagggtaaataaaacaatgcaccctgaaactaagtatataaaatatcatatagaaaataatctatcctctattattttacaagtaacccaaaattgtaatttacgttgtgactattgcatttattctggttcatacagcaacagagttcatacaaataaaagaatgaatatagatgtagcaaaaagaagtattgactatttgattaagaattctagtcaattaaatgaagttagtgttggcttttatggaggagaacccttacttgagtttgatttgattaagcagatagtagaatatgtaaaagtagttggagaaggaaaggaaatatactttaatctaactacaaatgcaactttatttaatgaggaaataatagaattctttgtaaaaaataatataacaactatgattagtttagatggaggaaaagaaattcatgataaaagtagaaaatttgcaaatacaggagaaggatctcatgatgttgtattaaaaaatgtacgttacataaaaaataaatatccagaatattataaaaagaatattacatttaatacagtgataaattcagaaaatgattacatttctatagatgattttatatctaaaaatgagactttaaaagattcaaactttttagcttccactcttaataataactattctgataaagaaatagtttcatcagatgaatatatattaggtaagagttatgatagattcttgactttactcaacaaattaaaatttataaaagatgagagtatgtcacctttatcaagaatagaaagagccttattagatgattttagatatgagaaaaatattgaaggtagattagagttaccagatgtgtggcatcatggtggaccatgtataccaggggcttttagaatatttgtaactacagatggagaattttttccatgtgagagagtaagtgaaagttctaaaatgggtatgattggaaatttagatagtggagtagatatagaaaaggctgaaaaacttttaaatataggaaaattatatgaagagcaatgttctgattgttgggcctatagttattgtgatatatgtatagctaagattgatgatactaaatgtaatgaaaatgaaataaaaccacatgattgtgacagaattagacattctacagaaaataatatgaaagattactgcgttttgaaatctctaggatatcaatattaaattttctaatgaaaggaaagatgggattatggaaaaagtacttatatatccatttaattataatttttttactattttaaatcattgcaataaaatttcagatatagaaattaattcactggttagtccttctggctgggggttatgcaataaggagtataatgttaataatattattactaaagttacaaatgattttcaaagtgaacttaaaaagaattctttggtatggtttgttgattcaaaagaaaatctagacttagaaaaatttataattcctaaattaaaagtagctctaaaagaaggtaaaaagatattatatacacgtgatgatcttaataaaatatctaggtatatatctcattatgaattcaaaaagattaatgaatggaatttagaaaaatatgaaataagagatatagagggtatatcacagataaacacaccaataatatttatttgtggtctttatggagggttagatacttttgatgtaaatataaggataggagaagaactaagaaaaagggggttttcaatattacaatttggtcctaaaaaagagagctatttatttaaaatgattcctataccagagtttatgtttgatgattcgataagtagtaagacaaagattattaattttaaccattttataaaagataaagaggtagaggcaaagccagatttaataattatagaagttccaggagaattattccctttctctagaaaaatggttggtaattttggaattagagcttttgaaatttctaatgcagtaataaatgattgtggtatattatgtattccatcaagtatatatgatagagaatattgtgaagaacttaaatattttattaaaggaagacatggtataaatatagattattttagtatagagaaaaaagttatagatacatatgagacagaggtgaagcaaaaattttcatatatgtcattagatgaaaacttttttgttgaagatatagaagattatgaaaaaacattttttatacatgataataaacaattactagaattagtggacaatatagtgaatcaattaaaagagtatgctaaagtaatatctatttagaattggaggttaattatgaattacactgaaaaggaattactactagagaatatattttttgatgtgactggaattaattttaataaaaataacaatttaaaaaaagaattatttttttcaccgtctttacatatacagccaagagaattacttttagtattttgcgaggtaatagaaaactttaatataaaaattccagaggaaaaacttttgaataggcaatttacgagttttgataatgttctaaaaataatcaatatggtataggttaataaaggtataaagtaagtgatcttatagaaaaggggaggatatgaatgagttttggaaaaagaatagaaatgaataatataggtgttgagacaagaggtgtttgtactattatgtgtccttatacttgtaagatgatggcatcttcatcttgtaactgcaagaataatgattataatgcaagaggaggatcatataatacatattataataaattgatacatggtcaaagaactcctgatggaatgtaaatatttcagtaataagtatactattaaattgatttagcatatttgattaaatttatctttcttactttatttccttttattataaaaatatgcagttgattataattaagagtgtgattttataataactgcataaatagtatctgttatataaatcacctcttcaattattatagtggtaaatatagtgattaggggtgatttttacaatttaaaagtataaattaattaaaagttattataataaattatacttatttaaatagtaagaattaaaagtaaagtttttaaatatatttgtaaaaatgtatatatattaataatattgattagaattaatatattatttcaatatttaaacattatttattggtactaatttccaaaatagttaattggatatacaatattattataaaaaataaatattatttattttagattttagaaattgaaatttccttaagtgaaggaggtaattagatgattagtatgattatgatgcttattggagtattatttatagtgtttgggataattttaactgctgtcgaaataaaaggaaaaatgccaggtttttatggagttgggcaaaatgcagtaagaaaaaatgctatagggattatagcagcaggtatagcattaattttttttagaaatgggttagatagtattgattcaattcttacctatggagtatttttagtgatagagttagtagtaataggattatattttcttataagaataaaatatgataaagatgggaatctttaaagtataaattaataatattttgattttgatatatgtttatataaaaaaattgtagataaattttataaaatagttttatctacaatttttttatatttattatattttatgagaagtaatagtataaaatattattgaattttttctctcgaaatatataatttagaatcttctgatttatttttatgctcgatttccttattttttttcataaatatatatagaggagctattaacaacattgcccctaatcctattaagactctattttgagttataggttttgaaatatcttctgcccaagcttgttgtaacaaccataagctacctaaaatagctaccattggtataacaggaccaaatggaatcttaaaagaggccttaacatctgttctttttcttaaaactattactgataaacaagttggtatgtactgagcaaatcttgcaattacactcattactgcaagttgttcaaaacttccagttagcacaagtggtatacaacaaattaaagatattattattgctacatatggagcaccatatttatttgtttttcctataaatgcaggaagagaaccttcttctgctagagaagaaccacatttaggagttactattgatgaacctatatttataccaaatatagatattaatgttgctacagatatgaaaactttaccataattgcctaaaaatacacttgaagcatctgcaattggaatactgttttcaaatagtctatctccaagtatacccatacagacaatttgaattaatatataaattattgcacatataaatattgtggttattaatgcgattggaagattttttttaggattttccatttctccacttgccacaataaatgattcaaagccggtaaatgcgtaaaatactaatataatggctggacccatactagagttaactacatttcctgaaggaacaatatttacaaattttataaagaatattccaactatcacaaaaactattaatggtactaatttagctatagttattacattattcattatctttgtgcttttaattccaaataagctatttattgaaagtagtgttacgagtattgcagctatacaacctttgtattcagtggcagattctggccaaaatgaacctaaagctgttgcaaatcctactgctagagtagaccatgatataattctaataaaccaagacattgtaccaacttcaaatcctataaaatctccaaaagcttttttggagtatagatatgctcctccattcttatcaaacatgcttccaacttctgcaaaacataaaagtattgatagaactaagagtgtagcaaaaatgtatataaacatactgttttgacctgctagactataaactttacctggtagtaagaatatacctgaacctattatgctattaatccctaataatatcatactaaatagacctaatttcttagctttttccatattaatttatctcctattcttttattaattactgtactaattaaaatacaaagtattcattacatgcatcataacacctattggtaaacaatcttcatctatattgaagctagaggtatgaagaggtgaaattaagcccttttcctcatttttacatcctaaatggaagaatgctcctttacaatgttctgtgtaaaaagaaaagtcttcaccacctaaagacgggtttggtctcaatataaatttttcctctccaagtaattctttagtacttgatataactgtatctactaattctttttcatttataacagcaggatagttttcatcacttacatgtaaagtcccaacacaaccaaatgcagatgcagtgtctccaacaattttagctattttatcaatcataaagtttcttgttttgctatttaaggttcttaaagtgccttctagttttacatcttcacatattacattgtgtgcatcaccaccatatattttacctatagtcaaaacggcagcattatttggttctaagtttctacttattatagtttgtaatgatgtaacaatttgtgaagctgtaactattgcatcaataccattttcaggatatgcaccatgagctcttttacctttgatacttatttttatagtgtctacactagcatttaatgtatcatattttgtttcgataaggcctgtttctatatgtggcataacatgaagtccgaatatataatcggccttggggttttctaaacacccatcctcaactaaaaattttgctcctccaaaaccttcttctgctggttgaaataagaattttacatttacattaagtttatcttttattgaatgtaaaactttacatgctccaagtagcatggttgtatgtgcatcgtgaccacaagcatgcatttttccagaatgtattgatttataaggtatgttgttttcttcttcaataggaagagcatccatatctgctcttatacaaatcgttttatctgcactttcttttaaaatatatgccataattccattgtgttttgtaaattccatataatcaattccgatttcttttaaataagaaattaccttctgtttagtaagattttcttcaagagctaattctggaattttatgtaattctcttcttatgtttataagccatggttttatagaattacaactttctattacaaaatcttttcctaattctttggtttgatattttaatttcaaagcctgttgcatttttattcctccaattgctttttattgttttattaatataataagcaattattatgccataattttcgatggagaattttgttttttataagaatattgaataaatataatcatttatctatatgtatagtataaaaaatgattgcatagtttcaattttcagtaaaaaatattattttgaagaaaatatattttatatgctagtttatataaaaaaaataggaaataaaaaaattatcctattcctattaattcctattatttatgtacaaaataaattataattttagggtacttgaaaaataaaaaaacctattgaaggagtactttaatcctgaatagatttctttgtttgataaattataattttatagacctttatattttaatttattgtaaaaatcttctcctttttgagttattttacttccatatcttcctgaactacaaattataagttcttctttttttagatattcaaatatttttttaatttttccttctgtaatttgaaggttcttatcgagtagtgcttttaaaattaatcccctaccaataccaacatctgattccttatttaaaattagtatctctaatatattcaatatatcattcttactatattttagttttaatgatgtatttttgttatctgaagaccttaagtttggaggtaaatctttctctaatacaatatcttcacacataatgtttaaataggatgtaacattttggagttctcttatattacctttccacatatagttttgtataagtttttttgcttctggtgtgattactaatttcttattaattaaatcttccataataattaatatgtcttcttttctttctcttagaggaggtatatttattggaattgtatttaatcgataatataaatcctctctaaattggctattatcaatcatttgttctaaattcttatttgtagcagatatgattctaacatctatattaattacattgtgagacccaacaggcattatctgcttctcttgaagaactctaagtagttttgtttgtaattctaaaggcatatcgcctatttcatctaagaatattgttccattattagcaagttcaaataatccttgttttccatcttttagacctccagtaaaagttcccttgtcatatccgaatagctggctttctaataaattttcaggaacggctgcacaatttactgctataaaaggttgattttttctatttgagttgttatgtatagactgagctatgagttctttaccagttccactttcacctctgataagtatgcttaagtcagatttagaaaccttcttagctaaatctatacattcaaacattttaggactatttgtttttatatccttaaatgtatattttgctatttgtcctttttctcttaattttttagtgagattttgttctaatttttttatgtatgttatttcttgtaaactataatatgtgcccattttttcatccctattgtatatgttttttttatttacatttatatatttcttattgaatacgacaactttatctagtatctctttctcactcaataaaacttttaaactatctacaaatatatcatcaatgtattttccatatatatcctcatttatgtctaaaatatcttttactttactattatatgtatttatttcaccatcttttgaagtaaataatataccatcttttgataaattcaatattgtatctaattcttctatttttaaaaataattccttatatttatcttttataccagtatctaaacttattatttcttctgagtatttaactagattagattgtatttcctttgaatcaatttgtaataaatttattatttctataaatgtagaaatatctatatatctgtgacctaaatcaaatatatctgagataaagctaggtactttttctggaactcctggagttatagctatttttatatttttatagttattatcattcatatatggaattggtctaatattagtcactccaattttataaaataaacttatagtttctagagtagtttcatcagaatcatttacgattagagcatttgtaccctgtggtaaagatagtagattataaattttatcttccctaaaagttcttcttaccacaatcacttttttcttatctagtatattatttataattttgtctaatctttctactgacattactaatatcacatcatcatttataatatcattatcatttatttcatttatgaagtatctattaatatttatagaatctccaaaaactaatttcaaattattttctaaaaagtctattaaatcttttctactatcatttaccagagctactgattttttcatttatttctccttatataataaatagtttccaacaaaatagttgtataaagcaatgtaattttgataatttaaatttatcaaataaaaaagaaagtgtctataatgactttataaaagttgcattaagacactttctttcttataattaaaaatcttgtcaccaaatccccctaattgttgcttaaaacttaaactgtatgtatatttttcatttctattcgattaaattataatatacacccaaaaaaatttattttaataaattctattgataatataattttgtaaatatagaattatattaaaataaattatatatgaaaatatatatgtataagtttattctgcgtgagtagaatgaatttgtcaagtttaatttagttgtaattgtatcttttattaaaaataatataaattaaaacatataaataaaatattttatacaatatattgtaaaggaggtaactttgatgaaagcagaaaaaacaagtatatatccaattattaaaaataatttaaacaaaatatcaattgttgaatataaaaagggtcaaagatttgtagcatcagataaagacttacaagaagtgttctttataatagagggagttgcattagtggagtgtactactagaggaggaaataaatttcttgttgacattgtacctgaaaatgaatttataggcaaaatcagttacatatatgaacataatttgaaatgtgatatatttgcaaagaccaatataaaattatttcgatttgaaaaaaatgtatttgaagagttttatctcaaaccagattttattgcactatttcacagaaaatgtacaagaagaatatatgaattatataaaaccagaatggtaagagaactattttcttgcacagaagttattgcctattgtatatcaaataaacaagaaaataatgtctgcaatataaaagctattcgtaatttcagtgaaatctattcaattagtagaaaaagtagataccattctctgctaaagttaactgaaaaggagatagtaaaaaaaatgggtaatacatatgaaattttaaactatgatgaattacataaattggcatttgaagtaaaagagtttttggaagatgagtaaaaattgttacttaatcaaaataaagtataataatttctgtaaaaaatagaaatagtctcactgaaaatcaaaaatactttagttattttcaatgagactgtttagaaatattgtatacttataatgtatagtataattattaatcaatttcctttactatattaatagcccattttttagataatgctctaggaacaccaaatataaacttaaccacttcttcactataagtgagtaaaacgagtacaaatataggtgcacctttaaatgcagctataaaagttagaggaatagaagctaaccacatacatcctaattctagaaatagagcatatttagtatctcctccacttcttaaaataccaattataaccaatgtattaaaagatttaagagccattagtattcccatgataaagaatatcttagttatatcagaagctaagctatcagaaacactaaacatttttaataataatggtatatttaaaattaaaataattccaagtattaaaccagctgaaaatacaagtatagaaaactttttagcatattcaatggctcttttaatatggtcagctccaagttcatttccaagcataatagatgcaccagatgcaatacatacagctgtcattatgaagaaattacctgtactggttgctatctggctagctgctatagcagaagtaccagctcttgcatatgcaacagaatacaggacagttccaattgcccatacagagtcatttacaaatataggaaagctttttgatgaaaaagattttataaaaattttatcaatagcttttagattttttagaccaaactttaatatatagtcttttttataaaggtaaacataagtaatcattaaaattaattcacatattctagcaataacagtagctagagcagcaccttttacacccaatgcgggaagaccgaagttaccaaatataaatccataatttaaaataacatttgttacaagtgcaaatgcactacaaatcatacctaacttaggatttctaacacctcttgaaccagtactaaatacagtacttacagcaattaatggataactaaatactgcaatactaaagtaatctatacaaagttttaccacctcagaatcatacgaaaatatgtgtataattggctttggtgttagtaaagcaggaataacaaatacaaaacttaaaacaattgccaatacacaagtaagacctgtgacttttcttatattactcacatccttctttccataaaactgtgaaataaaaactccagcacctcctgtgataccagataaggacatattaaaaagaaagaaaaattggtttgcaactccaactgaagctacagatgtctcccccaaactacttatcataattgtatctattacatttacagaagtagaaattaagttctgtatgataataggtatacataaagatagaagtattttataaaatcttttattttcgtcttttaaagaaaatagttcttgcaaataatcctctcctttttacataaattcttcccactcatcatatagagaggcaaggttattttctaaattaattttttcttggctaacttctttagctttatctggattagagtatacttcttcttgacataaaagtatatctaatttttcaatttcaatctctaacttttcaatttctttttctatattttgtctttttattctatttttcttttctatttctctttgttctctctcttttcttttttcatcttttatttgagttctagttttttcttctttttcttctataatactcatctcttggatttgcctttttttatctatataataatcataatttcccagatattcagtaattccattttcatctaaaactaaaattttatcaacaacagtatttagaaagtatctatcatgtgatattgtaaatatagtcccatcataattagttaatgcctcttcaaggacttccttagaatcaatatctaggtgattagtaggctcatctaataacaataagtttgcatttgatagtataagtttaagtatggcaactctagctctttctccaccactcaatgtagaaatcttcttaaaaacttcttcatctacaaataaaaatgcccctaacatatttctcaaagtagtttgagtaagatgagtattattttcccaaatctcatcaattattgtgttatctaaattaagagttttttgttcctgatggaagtaggaaacatgtacattagttccaaatttaatattgccactaagaggttgtagttcattagttattattttaaataatgtagatttgccaacaccatttgcacctataagtgcaactttttcccctctatatatatctaaatccaagtctttaaaaagtattctttctccataacccatagatacatctctaatttgaagaacatcattaccactctggacagaaggcgtaaattgtatacgagcttttttcctataagcttctggtttatctaaaacgtctaccttgtctaatgctttttctttacttcttgcacgctttaggtgtttttctctaccataagcttttagtctttcaattgattcttcttgcttttttatttctttttgttggtcttcaaatttcttaagctctagttctttttctattttagataactcaacaaatttagagtagttaccattatatactttaagttttttgttgtgaacttcaaaaattctatttacggattggtctaagaaatatctatcatgagatattaacatgacagttcctttatattgttttaaaaatacttctaaccattctattgcttcagagtctaagtggttagtaggttcatcaagtaacaatagagttggtttcttaagaagtaattttcctaaaagaactctagttttttcaccaccagaaagtatgcttattggcttatccatatcattgtcactaaatcctaatccttttagaactcctttggcttcagatttatatccatatccatttaaatctgaaaataattctagtttatgtgaatattcatccatgattttttctataattggagagtttgtttttgtactttcttcagatattttaacctccaattctcttaaataggattccatttctatcaaatttttaaaaacttctagcacttcttccaaaatagtattatccgaataaaaattggtattttgttctaaatatccgatttcacaatctttagaagtataaatatctccactatcatatccataaattcctgaaattattttaaataaagtagtttttccagtaccattaacaccgattataccaattttatcgccttcatttactgtaaaactaatattttctaatatagaatctataccaaaacttttatttaagttattacatgacaaaacaatcataaatttctacctccttgaactatctaaaattataatgttttgatataatataatcaaggttatatgtattagttttgaaaaagaaatattttattgtgaatcaaacaaaaaagaggacacttttaggaggtgaagatgttgggaaataaaaatatatcaatggcagttataagaaggctcccaaaatatcatagatatcttggagacttattagatagggatatacaaagaatatcttctaaagaattgagtgatataatagggtttaccgcttctcaaataagacaagatttaaacaactttggtggatttggacaacaaggatatggttataatgtagaagctcttcatactgagataggtaaaattcttgggttggatcgaccatacaacgcagttcttgtaggagcaggtaacttaggacaagctatagccaattatgcaggatttagaaaagctggattcgagataaaagctttatttgatgcaaatcctagaatgataggtttaaagataagagagtttgaagtattagattcagatactttagaagactttataaaaaacaataatatagatattgctgtattatgtatacctaaaaatggagcacaagaagttattaatagagttgtaaaagctggaatcaaaggtgtatggaattttgcacctttagatttagaagttccgaaaggtgttatagttgaaaatgtaaacttaacagaaagtttatttaccttatcgtatttaatgaaagaaggaaagtagacaacttaaacatattaataatgagcagttgtgaagagtattgagaaagtcagaagatttaatattaaatcctctggctttttgaaatattaggataaaaatttaaataatgtatggaaataaacaatattaaggagagtggtttttgtggaggaattatggaaaaaggcaattgaatttcatggtcatgaatgtccagggttagctataggatttaaagcagcacttgcagcaagaaaatatttaggatgtaaacagtcaggagatgaggaaattgtatgtatttctgaaaatgatgcttgtggaatagatggtatacaagtcgtgctaagttgcacaatgggtaaaggaaatttactacttaggatgactgggaaatcagtatatcatttctttaatagggaaaatggaaaatctataagaatatatgtaaagtcaaagccatttcaaatggatagagaaggatacaaaaagtacttattagaaagtgattttgaagaaatatttgagattacagatactaagttaagacttcctgaaaaagcaagaatatttaaatctcttaaatgtgaagtgtgtggtgaatttgcatctgagcaatatataaggattgaagaaggaaagaaagtatgtcttgattgctttaataaatatgaaagattttatgaggagtattaaaattataaattagattaaagttaaaagtattagatatgtactaacagtattttaagatgaattaggtagcaacataataaaatatataaataatattacttgaaccatacataattaaaaagaggctgattagtatttagaaaataaaatcagtctctttatgaataacgaattattattctggttgaggtgcatctacaggacaagctcctgcacaagaaccacagtctatacaagaaccagcatctataacatatgcgtcgtctccagctgatatacagctaacagggcattcagcctcacaagcaccacagcttatacaagcgtcagtaattttatatgccattttgaaatcctcccttttatatgtattgtaattcaataacattataacaaatattattgaatataacaattaaattaattctacaacaaaaactttattatgatattcttgttttaaagttttacaataaagtttaatctgcttatatttttatttattttaaagaagtttattttaaaaataaaattaaatttaaaaagttatgtattgattatatttaaaaatgttatactctaaaaaagtatattttattttaaaatttattaatacaaaggagatttactatgaaaaataaattagtttacatatgtattatgagtctattgctatttgtagtaggatgttctaataatccaaataaggaaagtaccattaaaaaagactctaagaataaccaaagccaagttaaagaagaaaaaagagaacctgtgaaaaaagatataactataagtttcgctggtgatgtaactatggggaactataaaggttcatcatattatggcagttttgaccatgaatttaaaagacaaggagaagattacaattattttcttaaaaatgtaaaacctgtatttgaaaaagatgacttaacagtggttaatttagaaggtccacttactacagcgtcaaatgcaaaagaaaaaaaatttgcatttaaaggaaagcctggatatgtaaatattttaaaatctggaagtatagaggcagtaagtattgcaaataatcattcagaagattattttgaagaaggaatgaaagatacacagtttatattggatgagaataaaataaattattttggattagggaaagatgctgttgtagatgtcaaaggaattaaagtgggtctattagggtataatggattatcaactgaatataatgaaaaaaatttaaaacaaatggaagatgatattaagtccttaaaaaagaaatcggatgttgttgtagtgtactttcattgggggatagaattagattattatccagataaaaaacaaaaagattttgctcattatgctatagacaagggagcagatttagttatggggtctcacccacatgttattcaaggaatagaaaagtataaaaataagtatatagcttatagtctagggaatttttgctttggaggaaataagaatccttctgatacagatagttatatatatcaacaaacctttactttttcagataataaattaacttcaattaaagagccaaatataataccaacctcaataacatctagtagctccagaaataattatcaaccaaaagtattggatggaagtgagaaggatagagttttaaataaacttgaaaaaataagcaaagatttaaataaataaaatgtaaaaaaaaataaatatatatatttattttaataatttatattttgtttagggtatggtaaatcgtggtattaaataagtagattttaatagttaaattatagtcaattataataaagctatttaatctacttttttaatataaaaatataagggggaatttgtaatggcttgtaacacttgtaaaatgtgcgaaagtgcagacaagaaattagaaagttttgtagcttcaaaggatgttgaaacagcatttcatagaacagaagatcagaaagttaagtgtggttttggacttcagggggtttgttgtagactctgttcaaatggaccatgtagagtaactcctaaatcaccaagaggtatatgtggagcagatgcagacactatagtagcaagaaactttttaagagcagtagcatcaggagcagcttgttatttacatgtggtagaaaatacagctaagaatttaaaaaatgttggaataactaaaggtgttgttaaaggagaaaaaacattaaatcaattagcagagatgtttggaatagaaagtgatgaaaagtatgataaatgtataaaggttgcagacaaagttatcaacgatttgtataaatcaagagatgataaaatggaattagtagaaaaaatagcttatgcacctagagtgaaaaagtggaaagagttaggtataatgcctggtggtgcaaagtcagaagtttttgatgcaatagtaaaatcatcaacaaatttaaatagtgatccagtagacatgctagttaattgtttgaacttaggtatatcaacaggattatatggtcttacactaactaatcttttaaatgatgttatgttgggagaaccagttataagaatggctcctgtaggatttaatgtaatagacccagactacataaatataatgataacaggccatcaacattcaacatttgcaaatttccaagatagattaaaagatgaagatgttataaaattagctcaatctgttggtgcaaaaggctttaagctagtaggatgtacatgtgttggtcaagatttacaattaagaggagaacattatcaagaagtatttgctggacatgcaggtaacaattttacaagtgaggctgttttatcaactggagcaatagatatagttctttcagaatttaactgtactataccagggcttgaaccaatagcagataaatataaagtaaaaatggtttgtttagatgatgttgctaaaaaagcgaatgcagaatacataggtttagacagaagtaaattagatgaacttagtaacactttaatagaaaaagcattggagtcttataaggagagaagaggaagtattgagatagatataccaaaagaccatggatttgaacaatctttaactggtgtaagtgaaaagaacctgaaagcgtttttgggagattcatggaaacctcttattaatttaattgcagaaggaaaaattaaaggtgttgcagctgttgtaggatgttcaaatatgacagcaggaggacatgatgtaaatactgttgaacttactaaagaattgattaaaaaagatataatagtactatctgcaggatgttctactggaggattagaaaatgttggtcttatgtcacctggagcagaagaattagcaggagaaaacttaaaagaagtatgtaagactttaggaataccaccagtattaaactttggaccatgtctagctataggaagactagaaatagtagcaacagaattagcagctgaacttggaattgacctaccacaattaccattagtgctttcagctccacaatggttggaagaacaagcattagctgatggagcgtttggtcttgcccttggcttacctcttcatttagctttacctccatttataacaggaggaaaattggtgacagaagtattaacagaaaaattaaaagacttaacaggaggacatgttatagtgaatccagaccctaaatcttcagctaatcaattagaagaaataataatagatagaagaaaaaatttagggttaaaggatgtggaatgcaatgcatagaatttttataaataaagatttatgtacaggatgtaagagctgtgtactagcatgtatgctaaaacacaataaagattatgacatgtacactcttgatttagaaaatatagataatgatagtagagggcatatagaattagatagtaaacataataatccagttccaattctttgtagacactgtgatgaacctgaatgtgtattagcatgtatgagtggtgcaatgcataaagatagtgaaagtggaatcgtttcatatgatgaagagaaatgtggttcatgttatatgtgtgtaatgtcttgtccatatggattattaaagccagatgatagaagcaagcaaaacatacttaaatgtgatttatgtaaagatgaggagtatcctagatgtgtagctaattgcccaagtggagcaattgaattacagaaggaggaaaatgatgaattatgtagtgttaggggctagtgcagctggtataaatgcagtaaaaacattaagagaattagataaagattcaaatatagtagtaatttctaaagatgaaaacgtatattcaagatgtatgttgcatcacgttatatctgaacacagaactttaaaacaaataaattttgttgatgaagattttatggagcaaaataatgtaaaatggattgcaggtaagactgttaaaggtatagacataaataaaaaggtagttcaaacagaagacattactgtaaattatgataaacttttaatagctacaggtgcatcttctgctattcctcctataaaaaatttaagagatggaaattttgtatattctgtgagaaacatagatgatatttataaaataaaagaaaaagcacaaaattctaaaaatgtagttataataggtgctggtttagttggtatagatgcattagtgggattatttaaatatgagcagttaaatatttctgtagcttttatggaaaagtacattttagatagacaattggatgaatatacagcatcagtgtatgaaaataagttcaaagaaaaaggtgtaaaattttacccaagtgcatcaatacaagaaattgtattggataacagtaaaaatgttacaggtgttgcattttcaaatggtgaagttttagatgcagacatggtaattgtagctacaggggttaaaccaaatgctgactttttagatgggacaggaatagaatatgatagaggtataataatagatgatatgtgccaaacaacacaaaaagacatatatgcagcaggagatgttgtaggtaaaaatgctatttggcctctggcagtaaagcaaggaattgtagctgcctataatatggttggaaaagataagaagatagaagatgaatttgcttttaaaaatagtatgaatttcatggatataccaactatttctataggaatgaatacacctgtagatgatagctataaagtattaaccagacatggaattaatgattataagaagtttgtttttaaagataatgtaatctacggagcagttatacaaggagatatttcatatgtaggtgtattaacttatttaataaaaaataaagttgaaatatatgatttagaaaataggatatttgatgtatgttatgcagacttttttaatataaaagaaaatggagaattttgttatagtgtatagtatatacgtggagtaaggtttataaatacagtaaatcaataaatagagttattctaaaataagaaaaatgacaaatcttatttagaaatagctctattttttgtaattaaatttaaattatattcaatttgtaaaatattattttgaacaattatacatatactctctagttagaggtaaatcattttttatacctttagtgaaaagtatttgatgtatatctataataccagtgttgaaagcagcagcacaagaacaaaggtataaatcccacattcttataaacttatcatcaaacatttctttaatctttggaagattctcagagaaacttttttgccagtatagtaaggtttttacataatgtaatcttaaactttctacgtctatagtatgatatttgtaatcactacaaatatgtatcatttctcttaggctaggaataactcctcctgggaaaatatatttttttatccaagggtctccataagattcctgcaatccacttatatagtgaagtaaaaacaatccaccatcttttaaaacagcatttacgtttttaatgaaaagttcatagttttctctaccaacatgttcaagcattccaacgcttacaactctatcaaacataaggtctgatttttttaattctctatagtccataagtcttacctcaagatagtcttgaaggttctcttctttaattcttgcgttaaattccttaaattgctcttcgctaagtgtaattccaacgccgtgaattttatatttttttgcagcttctattagtaaaaatccccaaccacaaccaatatcgagaaggctcataccttcctctaaatttagtttagttaatatgtggtgaactttattgacttgagcatcataaagagtatcattatcatttctaaagtatgcacaagaataactaagtgtcttatctaaccataagctataaaaatcgttgccaatgtcatagtgggcatgtatttctttcttctgatgtctcattgaatttgatgagtgcaatagatgttttacagctgaattatcaatattgaatttgtctatttgttttaaaagtagatttaaagttaagaataaatctccctcaacttcaatgtctctatttatgtaggcttctccaagtgctaaagatgtactttttaatagttcagacttgctaatatcattatttactataactttgaactgaggggagccctctccaattagaaattcttcctcatctttaagcctaactagaaatggtgtttcaccaaatttctctaaatagtcttttaaaaaattttttgtaatattcatattaccagctccttctaatgtaaatccagtaagtttccctgcttaaaatatattatagtcctttttttaaaaaagtaaaattttttcaataaattttttatttaaaggaaatttattttttataaagaaatttcatgttgtagtatattttttgcttataaattttggtactggatataatattaaactgttaatgatataataaatttaatctataaagtaaataaaattttgtaataaatagttaaagctattttataaggagatatatgatggaagtatatgctttggttgggtcaagtggcacagggaagagctttaaggctttagagttcgcatatgaaaatgatatagaatatataatcgatgatgggattttaatatacaaaaacaaggttttagctgggatatcggcaaaacaagcaaatactactatagaagcagttaaaagggctattttttataatctggagcatagacaagaagttagagaagcaattaaaaaagaaaatataagaaaaattcttattattgggacatcaaaaaaaatggttaatcaaattgtagagagattgtcaattggaagggtctgtaagtttataaatatacaagatataagtactaaatatgaaatagaaatagcaaaacaagctagaaaagaaggaaatcatgtaattcctgttccagccgttgagataaaaagtatggcaagtggtctcagtataaattctttgaagagactttttagaaaaggaaataataggaatatggtagttttagaaaaaacaattataagaccaacttttagttatataggaaagttttatattagtgctgatgtaattaaacagattattgaatatgaagtatacaactttggaagcattgatagaataaataaaatcaatatagagaattgcaataattttatgaatatttttgtaagtataaatatcaatgatttagaaactataaaaaaaattgaagacatacaacagacaataaaaaagtctattgagaaaatgactttagttaatgtacaaaaaatagatattaacattcataaaattaaaaaaataaacttcctccaatgttaaaaaataaactgagaaaatgatatactaatttgcaataaagtgtgctataattaaactgtaaatttaggaaatggttttttctaaatggagtatacataattataacgtatttataagggggctttcaaatgtcaggaaaagatgtaaatgtcttcgagatggcgcaatctcaagtaaaaaatgcatgtgataaattaggtatggaaccagcagtttatgaattattaaaagaacctatgagagttatagaggtttcaattccagtaaaaatggatgatggttctataaaaacttttaaaggatttagatcacaacataatgatgcagtagggccaacaaaaggtggaataagattccatcaaaatgtttcaagagacgaagtaaaagctttatctatatggatgactttcaagtgttctgtaacaggtataccatatggtggaggtaaaggtggaataatagtagatccatcaactttatctcaaggtgaattagaaagattaagtagaggatacatagatggaatatataaattaataggtgaaaaagttgacgttcctgcaccagacgtaaatactaatggtcaaataatgtcttggatggttgatgagtacaataaattaactggacaaagttctataggtgttataactggtaagccagttgaatttggtggttctttaggaagaacagctgctactggatttggtgttgctgttactgcaagagaagctgctgctaaattaggaatagacatgaaaaaagctaaaatagctgttcaaggtataggaaacgttggttcttatacagttcttaactgtgaaaaacttggtggtactgttgtagctatggctgaatggtgtaaatcagaaggttcttatgctatatacaatgaaaatggtttagatggtcaagctatgttagattatatgaaagaacatggtaacttattaaacttcccaggagctaagagaatatctttagaagagttctgggcttcagatgttgatatagtaataccagctgcattagaaaactctataactaaagaagttgctgaatctataaaagctaaattagtttgtgaggctgctaatggaccaactactccagaggctgacgaagtatttgctgaaagaggaatagttcttactccagatatattaactaatgctggtggagttacagtttcttacttcgagtgggtacaaaacttatatggatactactggtcagaagaagaagtagagcaaaaagaagaaatagctatggttaaagcatttgaatctatttggaaaatcaaagaagagtacaatgttacaatgagagaagctgcttacatgcattcaattaagaaagttgctgaagctatgaaattaagaggatggtactaagatttactcttaataaataataggatataattatttaagatataaaggggctgtacatagtacagcccttaaattatgtggcttacaatgaagtaagctatttttgttttaacttataaataacttgataaattatgtaatttagaatgcataaataagatgggtgaaaattaatggttgatttaattttgaatgtattttttaccaccacatgattacaaattagaggagttagattggatttttggacatgaacttatgtattttaaaagcaaagaccttcatttaaagtatctagtattatttttaaaaatagtatattggtttaatccatttatatatataatggaaaaatatatggatttggattgtgaactttattgtgatgagagagttttaaaaaattgtactgtacaacaaaagcaagaatatgctctaactattgtaaattcaatgaaaagaggtataaatttttcaaataaatttgtaactggattaaataaacaatctgatattagaaaaagagtaatgaacatgttcagtgaaaaacataaaaatggtatcttaatggctttgattataagcttgttttcttctattacattttttaaattcgattcaactagtcttattgaagagaatgatttcttagagaggtcaagatatgcgtttgaaggaaggcaagaagacatgtttgtaacaatagattctacatatgcagatgcacctataaaacttagaaaagagcatgaagaaaactgtagagtcaatggaatagtaccaaaagattcagattcaatagaaattattcctagattttataaagattgtatggatttaaaaaaataagttagacttaatattgatgttgatattatgaattttttatatttaagcaattgaaaattttattatagattcaattttatatgtgtttaagtatgaaatttatagatagttgaaataattaaatatgattgatgcataggaatcattactaagctataattaattataggggagtttaaataaattatgagttacacaattataaaatgataaaaaatagttatctgttacaaaaaatgtatctttttaattaataaagataatatgaaaacttaaaaggcaaataaacttaaacataaaatactcttaaataagataggagaaaaatgtatgtctaactttattctaaatgggatttttagaacagttatagtaagtagtctaagcattcttctgatattgattttcaagaaaaatgtatttaaaagatttagcaaaaaatttaattattatatatggatgatagttgttattaaattatttttaccatttacatattatacttttacaataaatatcttgagaagtaaaaaacacattaatattaataacataaatttagagggatttaataatgtttcaactataagtaataatattatattgtacacttggattataactgtagtagtgtatttaatttacactatatttaaatatataaaacttaaaaatttaataaatgacttatcttatgatgttgatgatagagagattgtaaatctttataaaaatatattagaagaatttaatataacaaaagatataaaactcaaatactcttatgaagttgaaacaccagcattttttaattcatgtgtacttttgccaccacatgagtataaattgaaagagttagactggatttttagacatgagcttatgcattttaagagtagggacctttatttaaaatatgtaatcctgtttttaaaaacagtatattggtttaatccatttatatatataatggataaacatatagatttagattgtgaactttattgtgatgaaagagttttaaaaaatcgaaattcagaggaaaaaaaggattatgctttaacaattctaaatgcaatgagaaaaggttcaaatacttcaaataaatttatagctggactccataagcaatctgatattaaaaagagagttatgaatatgtttaatgaaaagtacaagaatggtatattaatggcattaactttatgtttattatcttctattacttttttgaaggttaattcaacgagtattgttaatcttaatgtattacctaaaggatttgaagacttacgaactgttagcagtatacgtttttcagttataggatttacatatgcagatgctcctaaaaatatgagggaagaatataaaataaattgtgaatcattaggtttgatacctaaagactctgataaaatagaagttggtgtagaatattatgacagtctattgaatgattaaataaatattattttaacagatattaattataaagttttgaatagtaatttgttgagaaataaatatatccttataaaaatagatacttatataccaagaataaaaaatagttaagatagtacacaaggatatacttataaagaacttaaataagtgaaataaattattaattataaggtttataattttaaaaaattagataaattcaggtgtaaaatactataaaacacaattcggaaaagtgtatgttgaacttcatttaaaatagaattttcaaagttgttatagtaagtagtttaagcattcttcttatattaatctttgagaataatgtacttaaaaaagttagtaaaaaatttaactattgtatattaatgatagttgctattgatatattatctaaaaaaattaagtatgaaaagattactgctaggacaatcttttcatacttaattttttaatatttatattctccaaaattttcatctttttaacttagaattattagaatttgagaatcactattaggaaataggttttgatttatgcagggttaaaaatttcacagaatatctaactttatactaaatccatcaaaaaatatacgccatataaaagcgcataaaaaaacacataaaacaatatttatgcgcactttaacctcgaatggtacaaaattctttacttttacagacccatattatataattaagtaaataatgtatatttaggtgacatattggataagctaatttatttattttattaatataatgatactataaaagttatataaagtggtttacaaaaaagttacagatagagcttttattaatgtattgtgtattagtattttatccttaggtacacttcacctacaaaatagaatcataagataattatgggaaaattttaggaggtttatcgtgaagaaaaagatattaataccagtatttgcatcagttatggcattatcagtaagttcaattgtaaatgcagatgaagtaaatgattcatctcaaaataaggatgataaaacaaatactgaattaaatttaggtgaatataaagaagtaaaatataaagttgcaaaaataaaagatggagtagctataaagataagagaagaaggtcaagttcaaaacatagcttattctggagatgaatttacggttttaggaactcaaggagaatgggttaaggttaaagttgaagatggcgaaggttggttagctactagatatgtagatatatctgaaggtgtaggatatactaacgctgataaagtaaacttaagaaaagataagagtgaaagttcagaagtaattgaagagctggaaaaaggaagttctttattggttttggaggataatggagattggttaaaagttaaagatggggaaacagaaggatatgtaaaatcatcttatatatctgataaagctcctgtaatagaagagccacaagtaaacccaagtattgaccaaaatgtagattctacaaataataatcaacaaaacaatgcaaatactaatcaacaaaataataattcaaatgtgccaacagctaactctaatgcagttcaagctgtacttaacttggcatattctaagcaaggttgtccatatgtttggggagcagaaggaccaaacacttttgactgttctggatttacacaatatgtgtatagaaatgcagtaggaaagaatataccaagaacatctaaagcacaatctaaatatggacaaactgtaagtaaagcaaatttacaaccaggagacttagtattcttcacaactaatggttctggttctgttagtcatgttggaatatatgtaggtgggggtaatatgatacattcaccatcaacaggaaaaacagttagtgtaactagtataaattcatcatactatacagcaagatttgttacagcaaaaagaatattataatcggtttgtaatatgacaaattgataaatacataaatatatataaacgctctatattatatttaatttaatcatggaaacaaaaaatgattatattttaaatgtactatagagcgtttttgtatcactttaaatctaatcaagattcaagttaatatgactattaaataggagccttttcatatgatgattatttgcgcaatcccttgacaggatagggtaaaggtggtaagctactaacagtacaaaaatacttttaattttagttcagagaggctaaaaaaggaggacgaaagatgttaaaatcaagaaatttaatccaaccagaagacttttcaatagaagaaatagatgaaatattagaattagctcaaaaaataattgacaatccgtcaaaatattctcgtatatgtgaaggaaaactattagctacattattttatgaaccatcaacaagaacaagattaagctttgaatctgctatgaacagattaggaggacgtgtagtaggcttttcagagccaaattcatcctctgcatcaaaaggtgaaactctaggagatacaatgaggatagtatctggttatgttgatataatagctatgagacatcctcaatcaggtgcagcttcagaagcagctagatatacggaagtgccatttataaatgcaggagacggcaaaaaccagcatccaactcaaacacttacagacttacttactataaaatcattaaaaggaactttagaaagccatacaataggattatgtggtgatttaaaatatggaagaactgtgcattctttggttaaggctatggcaagatataaaaatacaaagtttgtatttatagcgcctgaagagttaaaaatgccagattatataaaagaagctataaagggacatgcatattatgaaactaataatttggatgatgttataggaagcttggatgttttatatatgactagagttcaacaagaaaggtttgaagataaatcagagtatgaaagacttaaaaactattatattttaaataaagctaaattagaaaaggcatctaaagatatgttagtaatgcatccattaccaagagtaaatgaaatagacatagatgtagatagtgatgatagagctgtatattttaaacaagctaaatatggaatgtatgttagaatggctttaataataaaacttttaggtataaatgaagactaatagttatcatataatagtaaaacaaaggagattttgggatgtataaaattctggaaaatatatatataggcgaagatatgtatagaatgaaagtaaaaggtaattttgaaggtaaaatgggacaattctatatgttaagagcatgggatacttatccagtactttcaagacctataagtatacatgatatagatgaagaagggataacttttctttataaagtagtaggagaaggaactcaaattttgagtaacctaaaggtaaatgataatataaaattagaaggcccttatggtaatggatatgctaaggttgatggaaaggtagctctagtaggaggaggaatcggtgtagctccactatatttggttgctaaaaatataaaaaattgtgatgcatatcttgggtttagagaagatgttatattagaagatgaatataagcaagtatgtaataaagtctatacaacagtaggaaatacttttgtaacagatataattgatgttgagaaatatgattatatattaacatgtggtccaactccaatgatggaaaaattagttaagatggtagaaggtactaaaacgagaattatggtatctcttgaaaaccatatggcttgtggagtaggtgcctgtttagtatgtacgtgtaaaactaatggaggaaacaaaaagacttgtaaagatggtccagtgttctggggagaggacgtgatttttaatgggtaatttaagtgtgaaatttggaagtgtagaatttaaaaatccagtaataatggcgtctggaacttttggatttggaaaagaatataatgagatttatgatatacaaaaacttggtggtataagtagcaagggtcttactttaaataaaaaacctggtaacaatggtatgagagttcatgagacaccatccggtatgatgaatagtgttgggcttgaaaaccctggagttcaaggatttatagactatgaattacctttttttagtaaactagacttagtcagaatagctaatgttggaggtgggacattagaagactacttattaggggttcaaatgttaaatgacaagcctatagacattattgaattaaatatatcttgcccaaatgtcaaagctggtggaatggcttttggtataaaaaatgaagtggcaagagaagttgttcgtgaggtaagaaacataacgaaactgcctttagtaataaaattatcacccaatgcagaagatattgtaggaatggcaaaagtttgtgaagaagaaggtgctgatggagtttcattagttaatacttttaaagcaatggcaattgatataaaaaatagaagaccagtatttgaaaatgtatatgctggattatctggaccagctataaaacctatagctttgagaatggtacatgaagtgtgtaaaaatgtaaatatacctgtaatgggaatgggcggaataactaaagccacagatgctatagagtttataatggcaggagctacttgtatccaagttggaactgcaaattttatgaatcctagaataggtattgaaataatagatgggattaatgaatttatggatagagaaggaataaaaagtttagacgaaataagaggaattatataaggtagaataaatagtattttaaagataaaaaatatagattaaataaacaataattttataacattaacatggaggaaaaataatatgagtaaagtagatgtagtggatatattaaagaaaagtgatgcattgttggagggacattttttattatcttcaggaaaacacagtaatagatacgtacaatgtgcaaaagtattaagatttccagaatatgctgctgaggtattaagtacagttgttgaacaaataaaagacttagatatagacttagtagtaggaccagctatgggtggagtaatagtttcttatgagttaggaagacaattaggaaaagaagctgtatttactgagagaaaagacaatacaatggagttaagaagaggatttgaagttaaaaaaggagcaaagataataattgctgaagacgttgtaactactggtaaatcaactatggagacaaaaagagtattagaagccttaggtggagaagttgtaggtgttgcatgtatagcagatagaactaatcatgatataggtatgcctatatatagtgctataaaacttgatattcaagtttatgaatctgatgagtgtcctttatgtaaggaaggaaaattaccagttgttaagcctggaagtagagagttcaaggaattagggatgtaataaaaacttaattatttatagtgttacttaaaaaatgtaaattttttagagtaaaaatttgtaatataacatataacttaaaaataaaaagcagttagccttataaatgaaggttagctgttttttttgttaaaaatatatttacaaaataagagatagtagcagtacaatataagtataaggtaaaagtattatatattagggaggggtaagtatgaaaaatcaattaaatgaaaatcataaaaaggttgtattttttggagtaggtgctgtaggagctacttttgcagaacaattttttaactctaaatatgattttaaaattctttgtgataatgaaagaaagaaaagatatttagaagaaggatttataataaatggaaaaaggtatgattttaattatgtaactaaagatgagtataaacaagaggctgattttataattataggtctaaaatataataatttaaaagaaaatataaaagaattagatggattagttggaaaaaatacagttataatgtctctgctaaatggagttgatagcgaagagataataggagaaagatttggaattggaaaaatggtatattcatatgttaccaatatagatgcaaagaaaatcaataataatattatacacactactaatgggataattgtatttggtaacaaagataatagtgaagatagaaaaactaatataataactgaagtctttgatgatgtaaatatagaatatattttatcaaaagatattcaacgagatatgtggtggaagtacatggttaatattggtgtaaatcaaacttcagctatacttggtgcaccttatggagtttttcagagttctgagcatttaagagaattagcaaaatctgcaatgagggaagttgttgctatagcacaagcaaaagacatatctcttacagaagatgatgttgaaaattcattacatagaatactagaacattcaaaagaaggaagaacatcaatgcttcaagacgtggaagctcatagacctacagaagtagatatgttttctaagaatatctgcaaacttggaaaaaaatatagcatacctactcctataaatcagactttattttatatgataaaagtaattgaaagtagattttaaagggtatttgtaagaaatattgataattattgattttaaattttattaatgttatatactatttaagttactaaatatttttaactcttcaatgaaaatagttgctgcttttgacaaagttatatcttttggaaatatatatgagaaatgtctgttgtagctgcttccaagctctatgacagacagctcattgtttaaaacaggtaagcttgtcactagattagaaactattgtaattcctaaattatttctaacagattctttgacagcataattacttccaaaaaccatcatactttttggaataatttctttaacacttaaaaacatatctaaatagtctctggttccagaaccatcctccctgactatccatttttggtcttgaagtttatcaaaactaaaatcttttaataaatgactattgtatggaagtgctaaaaccatcttatcttcaaaaaaatattcttgaataaatgaaggggaagagcaagtgccttcaataagaccaatgtctaaaatataatccttaacatgagaagatacgattgatgtattttttataaaaacttctacatatatgtcaggatacttttgagaaaataatgctaaaaaatttggtagaatatattctccaatagttaaacttgcaccaatctttaagtgaccagttatagcatctgaaacttggcttacatcatgataagtaatatttaaaagatttaatatttctttagctcttttgtacaatatttgtccactttctgttataaaaatggttttttgtttaatagacctgtttataagcacaactttaaaataattctctagattttttatgtgtttacttacacttggttgtgatagatttaagtattccccagctttagtaaagtttttgtattcaacaacagctacaaatgtttttaattcttcaaacaattttttgtctccttcacctaatgaaattttacattttttatatactttctacagataattatactatatataataaccattaaaaacattaatcattacgatattatatatttattttacttatggttattacaattatatactattgctatgaagaaaactatattaattataaggtaggtatattatgttaaagaaaaaaagcagtttgacattaaaaactataagggaaatattaccaggactgtttatatcagtgttagtaggttatattagtatatttatttctattttaattcctaaggtaggggcagcatcaatttctatatttttaggtatgtttgtaggaaacctatttttaaatcaaaaggtatttcaaaaaggttataaattttcagagacagatttgttatcatattcaatagtactattaggggcaacactcagtgtatctaccttaatagacttaaaagtttcaggaattttatttataatattgcaaatgacaataacaataatagctgcactttatataggtaaaaaactaggatttgaagaaaactttagatttctaatggcaagtggaaatgcagtatgtggttcttctgccataggagcaatagttccagtggttaatgcgacagataaagaaaagggaattgcagtaactattgtaaatgttactggtatattccttatgtttttacttccaataatatctcaatttttatatagccatgaacttgtaaaaacttcagcaatgataggtggaactttgcaatcaattggtcaggttgtagcaagtggagcaattgttggagaaaatgtaaaagatttggctactatttttaagatagtaagagtaatatttctagttgttgttgtattagtatttggacatatgaaaaatcagtctaatagggaaatccttgaagaagaaaaggatgagataaaaaagaaaaaagtaactataccatggtatgtaattggattctttataacttgtgcacttttttcaatgaacattataccaaaagaagtatctgtgttgtgcaaagaaataagtaacaaactagaaataatagctttagcagcaattggattaaaagttaatgtaaaagatttagtgaaacaagggaaagaagtttctttatatggtttatttgtaggtacagtacaagttgtatcagctgtagttttaataaaaatatttatatagcacaaaaatagtatttgtaatattaatttgattaattaaaataatatgatactaataatttataatataaataaaaaatgaatttcgataagtttaagtgggtataaacttatagaaattcattttttatttaaggtaaaaatttaaagtaaaatattattttacataataataaccttataaattttgaaattacttatctttgtgttaaaataagtaaaatacacatattaaagttaagtttttaggcaaataaacaaaatgaaaatataaatattaaggagatttggtatatgaatgtttatgaaaaaggtaatggagttatactagaaggagtaacagattttgacccagtacatatatttgagtgtggtcaatgttttagatggcacaaacaagaagatggctcatacactggagttgcaagggggagaatattaaatgtcaaaaaagagaatgataaaatatatttaaataatacgaatttaaaggagtttaacagcatttggtataattactttgatttaggaactgattatacagaaataaagaataagctaaaaaatatggatgaatatttgaataaggctactgaatttggatggggaataagaatattaagacaagatggatgggaaatgcttatatcatttataatttcctctaataatagaattcctatgatacaaagagcgatagaaaatttatcaagaaagtttggtaagtatataggtgaatatgaaggtaatgaatactatgcattcccaacaccagaagaactaaataaggcctcacaagaggaaataagagcatgtcaaacaggttttagagataagtacataaaaagtactacacaggcagttatagagaataatgatgaggtatctgaatatacaaatttaagtacagaggattgtagaaaagagcttttaaaatttaatggagtaggaccaaaagtatgtgattgtattgcattatttggtatgcaaaaatatgattcttttccagttgatgtttgggttaagagagttatgcaagaattttatatagatgaagacatgagtttacctaaaatgagaacttatggaatcgataaatttaaagaaatgtctggatttgctcaacagtacttattttactatgcaagagaactcggtataggaaaataaattaagggggagaaattatgggagtaataggaacaatatttctgttctatttaattatatcatatctagctggagccataatttctgtgattatattgcttgaaaatagagaccctgcaaaaacaatgtcttggctattgatgtttattatatttccaggtgtaggtttaatgatatatgctatttcaggtagaaatattagaaaaagaaaattatttaagactcaaaaactagctaataatataaaagaaaagaaactatttgatacattagaaaagataacagaaatagttgaattagaaaaagaatctataaaacaaaataagcttttaagagatgaagaggatggtagttatagaaaaagggtaataaatatgttgttaaagactggtatgtttccctttactaaaaataataaagtggatgtatttgtagatggaaatgaaaagtttaaaagacttatagaagatataagagaagctaaagaccatattcatttagagtactttatcatcaaagatagtgaaataggtagggtgttaaaagaagaacttataaaaaaggctaaagaaggcattaagataagaattttatatgatgatgtaggatgctggagattttggtttaatagaaaatttttccgagaaatgagggaagtaggtatagaaattgcagcatttttacctacaaaatttcctataataggagggaaattaaactatagaaatcacagaaaaattgttgttattgatggaataattggatatacaggtggaataaatataggagatgaatatttaggcaaaaatgataagtttggatattggagagatactcatattaggattaagggtatttctgtatacatgcttcaaatgacatttctgattgattggtattatacgacaaaagaagtattagtgactaaaaattatttcccaagtgtagggaatgttggtgaaagtatgatacaagttgttgcgagtggtccagacagtgactgggaagatattcattatgcttatttttctgcaatatgtcaggctagaaaaaatgtttatatagaaactccatattttattccagatgaaagtctactaaaagctataaagagtgctgctcttagtggagttgatgtgagaataatatttcctaaaattgcagaccacaagatagtaaatatagcatcttattcatattttgaagaaatattaagagcaggtggtaaagtttatttatataataaaggatttatacattctaaagtcgtaataatagatgataaaattgcttctgcaggtacagctaatatggatttaagaagttttatgcttaactttgaggtaaatgcatttatctatgatgaagaagttattagggtaatgacagatgatttctttgaggatttaagtcactgtgaagaacttaatttggaggtatttaagaatagaaatatcatacaaaaaatcaaagaatctgtagcaagattattttcaccaatattataaaaaattattaaaaaaggtattgaaaattatgtgtgattggtatattataataattgttagcactctattagatagagtgataataaataaaaagtatatatataaatctacatatataagtagtattaatttaaaaataactaaaaacataggcgaactagtctatacttaatattttaggaggcgtgaataatgaaaataagaccattagctgacagagtagtaattaaaaaagtagaagcagaagaaaaaactgcaagtggaatagttttaccaggagcagctaaagagcaacctcaaatagctgaagttgtagaagttggaccaggtggaatagttgaagggaaagaaataaaaatggaattgacagtgggagataaggttatattccaaaaatattctggaacagaagttaagatagaaggacaagaatacacaatactaagacagagtgatgtattagctgttattgaataaatatagaataaatttattaggagggatttaaaatggctaaagaaattaaattttcagaggaaacaagaagagctttagaagctggtgtaaataaattagcagatacagtaaaagtaacattaggacctaaaggaagaaatgttatattagataaaaaatttggttctccacttataactaatgatggagtaactatagcaaaagagatagaactagaagatagatttgaaaatatgggtgctcaattagttaaagaagtagcaactaaaactaatgatgtagctggagatggtactacaactgctacagttttagcacaagctataataagagaaggtttaaagaatgtaacagcaggggctaacccaatacttttaagaaaaggaatacaaaaagcagtaatagtagcggtagaagaattaaaaaatcaatcaagaatagtagaaacacaagaggctatatctcaagttgcttctatatctgctggtgatgaagaagttggaaaattaatagcagaagctatggaaatagtaggtaaagatggagttataactgttgaagagtctcaaactatgaatactgaattagatgctgttgaaggtatgcagtttgatagaggatttgtttctgcatatatggttacagatgtagataaaatggaagcagttttaaatgacccatatatattaattactgataagaaaatatctaacatacaagaattattaccagttcttgaacaaatagttcaacaaggtaaaaagttattgataatagctgaagatgtagaaggtgaagcattatctacattagtagtaaataaattaagaggaacatttgatgtagtagcagttaaagctccaggctttggagatagaagaaaagaaatgcttcaagatatagcaatacttacaggtgctcaagtaatatcagaagaattaggttatgatttaaaagaagctgatttatctatgctaggtagagcttcatctgttaaggtaactaaagaaagtactacaatagtagatggttctggagataaaaaagctatagaagatagagtaactcaaattaaacatcaagtagagcaaactacttcagattttgatagagagaaattaatggaaagattagctaaacttgctggaggagtagctgttgtaaaagttggagctgctacagaagtagagttaaaagaaagaaaattaagaatagaagatgctcttaatgcaactagagcagctgtagaagaaggaatagtagctggtggaggaactgcttttgttagtgttataccagcaataggaacactaattgagagtttagaaggagaagttaaactaggtgctcaaatagttaaaaaagcgttagaagagccattaagacaaatagctataaatgctggtcttgaaggtgctgtaattgtgcaaaatgttgttaattctgaagcagaaactggatttgacgcattgaatgaaaaatatgtaaatatgatagaagctggtatagttgacccaactaaagttagtagaagtgctttacaaaatgctgcatcaatagcaagtactttcttaactactgaagctgctgttgctgaccttcctgaaaaagaagatgcaggaatgccaggaatgggtggcggaatgcctggtatgatgtaatttaaaaaatttaaaatataaattttaatataaagaactatttcgacttagattttaaactctaagttgaaatagttcttttgtatatatctaatttttgtatatctataaattcaatacacatatttagataatcagtatctagtttgtaataatattttagagtagtattgttattttttaggttatgattttagatatatattaattaaggtataattgttgatagagaataaatcaaatttaaaaggatgcgataatatggacttaagaaaattacttgaagaagttaaaaatgaaaatattgatatagattttgcgttagaaaagttaaaagatttaccttatgaagaccttggatatgcaaatatagaccatcatagagaattaagaaatgggtatccggaagttatttattgtgaaggtaagagtgatgagcatattttagggattattgataaaatgaatcaaaaaagttctaacatattggggacaaggtgcagaaaagaaacttttctgaaaattaaagaaatctataatcatgctgagtacgaagaggcgtctaaaattcttaagattcaaaatcatgatatagagaatataggaaaaggtaaaattgtgattgctacagggggaacttctgatataccagtagcagacgaagcttatcatacagctaagtttttaggtaatgatgttgatagaatatatgatgttggagtggcaggtatacataggcttttaaataaaagacataaaatagatagtgctagagtaatagtagccgttgcaggtatggaaggtgctcttgcaagtgtaattggtggactggttgatgttccagtaatagctgttccaacttctgttggatatggagcaaattttggaggattagcagcattactagctatgttaaatagctgtgcatctggaatatctgttgtaaatattgataatggatttggagcaggatatttagcatcaatgataaataaactgtaaatacattgatataaattaaacaaaactatataataaaatttaatttctattatatttttactattaaaattgaggagacatatatgagtgaaaaaatactttattttgatataataagcggtatatcaggggatatgacccttgcaagtttattaaatttaggtgtgcctaaggaaatttttttggaggaaattcataaactaagaatgagcgatgaatttaatataaacatcagctcgaaaactgaaaatggaatagtaggtacaaaagtagaagtaattacaaaagaaaaacatacacatagaaatttagtggatatatttgaggttatagataaaagcactctaaacgaaaatgtaaaatctaaagcaaaaaaaatatttatggtaattggagaagcagaagcaaaagttcatggaactacaatagacaagatacattttcatgaggtaggggctatagattcaattgtagatatagtaggagcttctatattagttgacttactttgtgtagataaagtttgtgctagtacagtgtctgttggttcaggatttgtaaaatgtgaacatggaattatacctatacctgcacctgcaactatagaaattttaaaaggtgtgccaattaaattaaataatgtaaatggagaatgtacaactccaacaggagctgcaatcataaaagtcttgtgtgatgagtttgtagatgagcttgaattttctccaaagcaaattggatatggtataggtcataagaagtttgaagtaccaaatatactcagaactgtattaggtgaaaaaaaaaagaagaattaatttatgaaattagtgcaaacattgatgatatgtcttcagaaatctattcttatttgtatgaaaaaatattagatgagaaagcattggatatttatacagagagtatttatatgaagaagaatagaccagcaacaaaagtatcaattttatgtaatgaatcagatttagaaaagtttattaaaatattacttttagaaactagtacttttggagtgagatataatgcatataatagagaaattttagagagaaaatttgtaaaattagatacaaaatatggagtggttacagtaaaactagggtattataaaggaaaactagtcaaggttactccagaatataatgaatgtaaaactatagcaaaaaatgaagatattcctataaaaaaagtgtttgctgatataaattttagaataaaagaagaatttagtgaaaacttattgacataagtaataaattttgataaattaatattcagccttattaaataaaagtaaacagaaaaaaatatataaaatataaactcactcgtatatgctcagaaatatggtctgagagtctctaccaagataccgtaaatatcttgactatgagtgaaattattataccaaaagacctagttaagtaaatgtgtaggctgagttatactccctatgtgttggctataagataaaggtattttggaagcctgtatagtaatttcacttttgctagaaattatggaagttactatacaggttttttgtgtaaaaagatttaatataatttagactgtattgtgttaaaataaatatataaaaactatattatacaaggagagatgtgaatttatgaaacatgaattagtacttgtaatagattttggaggacaatataatcagttgatagctagaagagttagagaaaacaacgtatattgtgaaatacttccatgtactgcaagcatagaaagaataaaagaaaaaaatcctaaagggataatatttacaggcggtccaaatagtgcgtatttagaagattctccaacaatatcaaaagaaatatttgaactaggagtaccaatacttggaatatgctatggtattcaaataatgtctcatgtattgggtggagttgtaagaaaaggtaataaacaagaaaaggaatatggaaaaacatctataacttatggaaaatcatcattatttgaaggaataactacaaatagtgtatggatgagtcatacagatttaatagaaaaagttccagaaggatttactatagttgcaaatactaatgattgtccagtagcagctatggaaaatgtagaacgaaacctatatggagttcaattccatccagaggtagaacactgtttggaaggggacaagatacttacaaacttcttatataatatttgtaaagtaaaaggtgactggactacagattcattcatagaagataaaataaaagaattaaaagaaaaaataggcgataaaaaagctttatgtgctttaagtggaggagttgattcttctgttgctgcagttcttattcataaagcaattggggacaacttaacttgtatatttgttgaccatggtttacttagaaaaaatgaaggaaatgatgtagaaagaatatttagagagaaatttgatataaatttaataagagttaatgcagaagatagattcttatctaaattaaaaggagtttccgaaccagaagctaagagaaaaataataggtgaagaatttataagagtatttgaagaagaatcaaataaattaggaaaaatggatttcttagtacaaggaacaatctatccagatgttatagaaagtggacatggaaatgctgctactataaagtctcatcataatgttggtggaatcccagaagatgtagacttccaagaaattgtagaaccattaagagagttatttaaggatgaagttagaaaaataggattagagcttggtatagaagaaggattaatatttagacatcctttcccaggaccaggtctaggaataagagttataggtgatgtaactaaagaaaaatgtgatatattaagagaagctgatgctgtttatatggacgagcttagaaaagcaggtttatacagagaaatatggcaagcttttgcaacattaccagatgttaagactgttggagtcatgggtgatgaaagaacatatgcttatttagttggtttaagagcagttacttcttctgatggaatgacttctgactggtataagatgccttatgatgtattagaaagaatttctaatagaataataaatgaagttgatggagtaaatagagtagtttatgatataacttctaaacctcctggaactattgaatgggaataaaatatagaatgccagaaatccacatgaatacaggatttgaggtctctcttacttctatattatactggtttgatactatcaatatttgccagtatcttatggattaataagcaaaaaacatcctgctgaatggtaaattcggcggggtgtttttattttgttttgaaactcctttgctctgaaactcgaagtatttaacactgatgatgttgttatcttttagttccttttgtgtcatgctctgaaagacaaattgatacaataaaaaagtaatttcttaatcattgatggagatatgtatttatgttactcttgatggtaatttgagtaatattgttcatagctttttatattcacttaattagaaaaccatttggtataatcataaataaacttgatgatataatagaaaagatttataattattagaagtatataaaagtattttatgtctatgaaatgtatgtctataaaacatatagatgacttttgtatattaatgtatgaatattgatattatagaagaattgagttgtcaatgatactaaatcaaatatttatagaagatggagggattatgagaaataaaataattataggaattactttttcacttgtattactaatgtctggatgtgcttcaaaacaaacagcagaaataaacgtattagcaactactgatttacatggagttataccttatgagttaacttcttatgtaaaagaagaaagaaaaaaagataaaaatctaactttagtagatgcaggagatttttttgatagtggagaagtgtttggttctagcatggatagttattttagtgctagatataaagatggtgataataacactgaaagttatattgagacgcctatttcaaaagatatgaaagaggtaggttatgatgttgcagttcttgggaatcatgaatttatatccaacaataaattttatctagataatatgatatctgattttgagaaacaaaaaataaatattttatcggcaaatacgtataaaaaaaatggagatagttatacaaaaccatacataataaaaaatattaatacacctgaaggaaacgtaaaactaggaattttagggcttactataaaagaagttggtgagaggaaacagtggaaagatggaaaacttgttgactctaagtctttagaactaaaagaccaagagggctacaatggtgaattgtatatgaatgatttagtagaagatgctaaaaagtgggttggtataatggaaaaagagaagcctgacattatagttgctgtggcacatacaggtgagaaacctaagaaacctagaaacccaggaaatagaatacaagacttagctcaacaagttgatggaattgatgctatagttgcaggtcataatcatgttcaaattgagcaacatgattataaaaataaatcaggagaaaatgttatagttactgagccaggaaagcatggggaatatatttctaagattaattttaaattagaaaaaaacaatgataaatggaatatagttgacaaatctagtaaattaattaaatttgaaaaaaatcaagaaagtgataaatttggagaatttatttcttcaattaataaagtaagtaaagataagaaagaaataagattatcagaagtaaagactcctgaatgggataaaatatatgtttttaaatctggaacatctgcagatgatatatataaaacaataggatataaatggagaaatatatcatctccaaagggtgatgacatggtgcagattgttgtaatgaataataataagcctgttagctatatatatggtgaagctgaagttatgccaattaatataaaatgtgatgaatcagagtataaaaataatgttgtaactatttatcctaataaaaatgataaatttaaaattgaaaaaggtaagcaagaatatagtattaatttaaaacatatacaatagaaacttttatcttatttaagtttagattgtacttaaaataaagtgtgtattattttaaaaagtgatgataattaaaatcacaacattaaggaatagtacacactttttatgctaaaaaatagaatgttaaaaaattaaacctttaaattaaagtacattgcttatattatccaatattatttccaaaggttgtgtaatatttttatccttatgtaatattgctaacattttattttccatatctatctcatctaattcaatcaatcgcaattttttatgtaagagtgaatctaataataaattttctggcaaaatggttatacctaaccctgcttctgcagctttaataagtgcaaaagaattaacactttcccaaacaggataagctttttggtttgaaagagataatacactgtccaaagtatcgcgaatagcacttccttgttcacgtaacaataacggaaacgtgcataactgtcgtagagataaggtttgttcagataaaggaaaagttggagcacatgcaacacataacttataggaacctaataaaattgtacggaatgccccctgtggttctataccttcccaaaaacatatatcagcttctccactttttaaaatatccatagctgaattagcactttcgacacgtacattcactttaagagatggaaatgaattttttagtcgacttaaaattggtggaagtaaaaaagaggcaattgtaatgctagaaacaatgtttataggtgtacattcttctaaacgactgatttttttgtctaaattgcgacaagcagttaagatactacgtgcttcatctaaaagagaaatgccacagcgagtaagacatacccctcgtggtaatctgtcaaatagtgatgtttcagcttgttgttcaagttcagctatagcatgagatacagcagattgtgtgatatgtaatttttttgcagcacctgtaaaagtgcctgtttgttcaattgcttctaaaatctctaaatatcgtatgtttatcataataaatatcctcactatacatgaataaaattaattaattccattaaattctatcattttacagattgcaaagcaacaggtatactgaataatatgaagtgaaaagaaggaggaatattttgaatcaaagcagaaaaatatatttttggcttttaattattaacttgtttattagcacattcacttttggcggagggtatgtagttgtacctatgattagacgttattttgtaaatcaaaagcaattctttacagaagatgatttgatgagtatggcagcagttgcacaatcaactcctggagctattgcaattaatttatctgctttggcaggttatcgagtagctggtactttaggggttgtcattagttgtacagcagctataatacctccactcgttattcttggattagtatcagcattttacaccacttttatatctaatgccattgtaactgcagtattaaaaggaatgcaagctggtgttgctgcactaattgtggatttgattattgacatgtgctctatgatattaaaacaacgttctttgtttttatcaactatgatacctattgctttctttgcaaactttgtgatgagtataaatgtaatttttatattatctgtttgctgttttgtatgtgtaatgcaagttttctataagaagagggaaaataaatgaatacaatttggaacttattttttatatttttaaaaataggcttgtttagtattggtggtggttatgcaatcatacctttaatccaagagaaagtagtaaatcaaactggatggataagtgagaaaatgtttacagatattataactatttcacaaatgacaccagggccactggctgttaatacttctacttttgttggacttcaaattggagggttttggggagcagttgcagccactttaggttgtgtattatgtggtgtagtaatatctctatttttatataatttttttcaaaagcatcagaactctacttatatatttgaaatattaaatggtctaaaatcagcttcattaggtttaattatctcagctgcggctacaattataatccttgcattatttgggacgaataaagtgtacttcaattctatatttgagatgctaaactggactgcactaataatcttttttgttatactactgatagtacgtaagtggaaaattaatcctattgtgattataataataagtggtatactaggaatatttttttatttataagtttttggtaagtaaaggatatctatttttttatatcttaaatccaaatagccaataaagtaaggctatttggatttttaataaattctgaaaagataatcagaaacccatataacatttaaattatatcactggttttctacaaaccaatcataagcttcttggcaaaatttctcactatctatatagtaactattatgaacattattaatttcaacaagtttctttttacattttagtgaattataatagctatcaaaatattgggttttaaaatatctatcatgaagtgttttaaagacaagagtaggtatgttgactccatcttttatcttactatcttctgcaataaagcattctaacattgtattaattatctttgtactatttttccaaatatgaggatttttcttttcaaatattttataaaattcattatcatagacttcattataacctttatatttaggtggttttactgttatgtgaaaattaggaagaaacttaaagaaaaaatataataatttttatgttctgttttatatattattcatattttatcacagataatatactaaagttaatttttttattgtacaactattataataattcttctataatataagacattctataattttatatttaagttcatgtgtatttaattgtttttatataaaatgtccagtaatactatttggatttatttttatttcatcaggagttccagaagcaacaatttcccctccatttattccactgtctggacctatatcgataatccaatcagaagcacgtataacctctgtattgtgttcaataattaaaagtgaatgctgttcatttacaagttttctaaaagtaatcaacaaattttctatatctttaaaatgaagtccagtagtaggctcatccaatatgtacagcattcgttttttagtttttgtccctaattcttttgctaattttatcctttgagactctcctccgcttaatcctaatgtattttgtccaagctttagatatccaagtcccacttcatctaataaggagagttttctatatatatcagagcaatcactaaaaaatgtttttgcttctgctacttccatgtcaagtatatctgcaattgtttttcccttgtattgtatagacagtatttctttttgatatctcttaccttgacattcattacaagttacccattggtctgccatatattgtagaataatttttgttttacctaatccttgacagtttgggcattgcccctttttgctattaaagctaaaatagctttcatccaataatttttgttttgcttgtggagtttcagtaaatagagaacgaatttcatcaaaaatattgatatatgtagcaggtgtagaacggctagattttccaataggtgtttggtccattaagataaaatcgtcaatagcatcaaatccagtaagtgcagtataatttttatttgggatagatttttgtttcaatttttcttctagagcaggaagtaaactgtgaaatacaagagaactcttaccagaaccactaacacctgtaatagagcacatacagtttaagggaatttctacatcaatattttttaagttatttgcatggcatccctttaagcttaaccatttacttggtataattttattttgtgaacttatcttattgtatgtactcaaatatttgcctgttatagaatttggattttttataatttcttgggttgtaccttctgcaatgatgaagcccccttttgtaccagcatttggtcctacatcaataatataatcagcagacagtattgtatccttatcatgttccactactataacagtattacccttgtctcttaattcttctatcattttgatgattagattatggtctcttggatgtaaaccaatagatggttcgtctaaaatataggttaatcctactaattcacttcctagctgacttgataatcgtactctctgcagttctcctccagataaagttggagctgttctatctgttgatatatagctaagacctacctttaatagataactaactcgaatttttaattctgttaagatatcatttaccaaagatagctcatttttttgaagttgatttggtaattcacacaaccaattccataactgttctatcgtcatttttgttagttcagggaagcgataacctttgattgtagtgaatctagcctcaatgcacagcaattcgccaccacatgtattgcaaggaattttgttcatatattgatgcaaggtattattttcagaactagattctctaaaaagtctttgaatgtggttgattgctcctgaagcaggccttctaatctttgattctcgtccctttgattcaaagctaaattcatatatcttatcgtctgtaccatataagattgcatctataaaatctcttggcaattcattccaaggtatatctaggtctatatttttatcttttgctattgcatataattcacctaccatccaattaccatttggctttttccccctcaattttccaaaatagtaagtagctccatctaatattgaaatagttgggtcttttacaattaattgaggattaacttgataggtaaaacccaatccattacaatcgtgacaagctccagtatgggagttagcattgaaggttgaagtatttatcttagaaaaaatagtttggcaatgtggacaataattttttgtattattctttttttctaatggagttttgcaatatggacagtaactttttccgattgatacaaataacattcttaagtaatcccaaatgcttgtaagagtaccaacagtagaacgaggattttggcttccttttttctgttcgatagctatagtaggggttaatccctgaagtaaatcaaattccggtttttgaagctgttctgaaagttttgctccattacctagattttcaaaataacgtctttttccttcttcataaatcgtatcgaaagctaaagaagattttccactaccacttacacctgtaataacagttatttgattttttggaattgtaacctcaacatcctttaaattgttttgccttcctccttttagatagatagagcttttattatgacaaagtgaatttttaattgatttatttattgcttttgcaaatttgaatttcttttctagttcaagaggattgcctaattcttttatttccgaaatacctaatatttttaactgagaaaagattgatttcaaataatcttcaggcaatttttctattaacaaattaaggtcttctatttttatatttccgcttgataatatctctgccatttcatctaataaatttttttctgctcttgttaattgattgtattttttggaacttaattctgtccataaatcccatggaagcaattctaaaccaatcatattattaaagtcatgtagaagattaccctttacagaatgccaacctttccaatttttattatatccaaagtcatctggatgagcatgtccttgtcgacatcttatccaggcttctgaaccagttaaaaaaccatctgtttttccgacatcatgagtgtcaaaattaatttgaaaataatttttttgtatgtcatctatttgtgcatctattcttatccatctctttgttagagtatcatagtattctacaagccagtggtcttcataagtaagctcattttcaaaataattagcaaaacctgctctcattctagcctcaaaacctcgatatcttaggagcgatacaagaagtaaagaataatctctgcacattccaacaagcctttgttttgggtttcttggaatagttagtgggttagaatttatttcaaatattctttttaacatttgaggaattgtacgaagcaattcctcatcagattgttgcttattaaaggatataccatataattttccttggtctccatgaattactaggctttgaaccacttttaataactcaattggagtctttggtaaatcttgatatttattttcaaattttttaggatttgtgatgatgctttgatttttatagttatttattttcatttatatttcacctctctaaatggatgatataccctgacatggtgtcatatgcaaggacaatttagattttttggccaaaatttaaaaataaataaaaaatgatacagtgataaattgtaatacaaatatagtttcaaattgcatataatataattatttaataaaaccattatctatggaatgttaatgaaatgttaagatggcattcttgaatattaagaaatagaatactataatatagtgtgaaggattcttagtaaaaaaatttgtaagtgttaatatacattaaaaaataggtttataatttggaggaaaaaaatgaaattatcaaggtataagaaaaatagtttagttctgtctataattttatgttcacttattatttcaatccttgtaattactgtttttaataccgtaaaactacacaatatatctaataaacaatctaaaaactatttaaacgatgtatctacacagattgtaatgaatgttgattctaaaatcaaatttattttatccgacttaagaataatggcagattttattaagcaatatgaaggtgatagtcgatatgagtatttatctaaaagaaagactagttataagtattatgatgttggaataatagatttagaaggtaaagctgagtttttaagtggaaaaaagtttgacttaaagaatactgcttcctataaaaaaggaattgaaggtaaagaatactcagaagtaatagagtcaatgggttttgttctttatagtgtacctatatttaacgataatcatgaagtgtctagtattttaataggtgtatccaataaagaaagcatggatgagattcttaatatagatagctttaatggagaaggaactattgaaattattaatagtcagggaaaaactcttttcataggaaaaaataatgagttaataaaagaccttagctataagtataaggattctgcagatgaaccttgggcacaaaagatgcttaatgattttaaaaatgataaatcaggaaatattacaataacctcatcaaaaggtgtacaatgcttattaacttatcatccaattacaagaggtttaaatgattggcattttcttctcatagtacctgaagatgttgtacttggtgaacttaataagttaaattcttttacaataataatgacatttataactacatgtattattggaattataacattaattttatatattataagaagaaaatatgtaaatcaaatagaaaatattgcatatttagatagtataacaaatggtataaattcaactaagtttagtatgctagtcaaacctttaatttcagaatcacctgatagtacttatatgatgatagcaatgaatataaaagattttaagctaataaatgattgtttcggtagtgaaaaaggaaatatgacactaaaacatctttacaatattttgtataaaaacattgatgaaaatgaagaatttgtgtgccgtcatgatgcagaccttttctatttgcttattaagaatagaccagtgttagaagccctggagttattatataaaatagaagctgacacaaattattttaataaaaatagggaaaatccatactttttaagactatcagtaggtatttacacaattgaaaatcataatgaagatttaattacaatacaagaccatgcaaatacagcaagaaaaagctttaataaaactcatcaaagtgatttttctttttatagtgatatagaaagaaaacgattaatatctgaaaaagaaatttcaaatttaatggaaaaagcccttgaaaataaagaattttttatgtgcttacaacctaaaattgatataaaaagtggaaaaattagtggagcagagtctcttgtgcgttggaaaaattcagaaaagggcataatttatccaagtaattttattcctcttttcgaaaaaagtggatttatatgtaagttagatttatatatactagaagaaacatgcaaattgatttctaagtggataaaagaaggtaaagaagtgttgagaatttctgttaatgtatcacgtcaacatttgaatgataaattgtttttagaaaaatataagcatatatgcaataaatacaatgtaccaacatgtctgatagatttagaacttaccgaatctattttcttagaaaatccagaagctatagatataatagaggatattcattctaatggatttaaatgttctatagacgattttggatttgggtactcatcattagggatattaaaggattttaaagttgatataattaagttagaccgttcattctttgttagcaaaaataatatagaccgtggtaaggtagttattaagtctattattgaacttagcaaaaggctaggtatgaaagtaactgctgaaggaattgaagaattagaacaagttgagttcctaaaaaatgtaggatgtgattatattcaaggttatgttttttctaaaccattattaatttctgattttgaaaattttgcatatgaaaataataaaattaaaaatatccattattaaatgtacaagataaaaaatttaggcaagttatataattaaaaatataacttgtcttttttatttatatatttaataaaaatatatttgcagattttgtaaaaataattttcaaatgttgtaagttgtggctaaagctttattgtattattctgaatatagaaagatagttactgtcttagataaaaactgaaacatacataataatataaaatttgctatattaataactctaattattttggaaggagggaaaatatgataagtgggagaatgttactcatcatgaattttctaaaaggaaaaaataagacaagttacaaggatattagcaaacaacttagtatagaagaaagaaaagttagatatgatataaataatttaaatattgttttgcgttcattaaacaagtcagtaatacaaaagatgaacaaaggtgtgttaattattcctgatgacttccaagtagtatgtataaataataacgaatatgtattttccttaactgagcgagtatctattatgaaaattatatcaatgtttaaaatagataatctaaacttagaaaaattgagtaaagaatttcaggtttctagaagttcaattaaaaatgaccttaatgttttgtcaagtgaattagaaagaaaccaaataactattacttatgataaatcttttaaaataagtggagaagaagaccttatatataagcaaagattgaacatattaaaatcgtattcttatctttttggtaaggaaaaatctgatttaagtgtatttgagaagtatttagtgaatgtaattgaaaaaatattcaaagggatttatttgattgatatatataattggtctatgaatttattattgcaaatgggatggactttaaatgatgaatcttttacatggtatgtgtcaaacattttcctttttacatggtatatacattcagatgaaaaacatcctttagaatctgcttcattaagtgagccatgttttgaaaataagtttgaccaagaatttgaaacaattattcaaaaaaagttgactaaggaacaaatttttctgttaaagagttttgtattttttacaaataaatatgcaagtttaaacgaggatatggatttgattagtacagaaattatagttcaagacctaatttacaatatgtcagaaatattagagattagctttaaagaagatatgattctttataaaggattactcaatcatattgccccattgatagagagaatcaagcagaatatacagatttatgaggaattacttcatgtaataccagataaatatcaatatgtacttgaagctactaaggtttctattcaaaaaaacagagttttaagtcaaataaagaatgaaaatgaaataatacttttggcaatacatttcttaggaagtatacatagaaatgagaggaataactacaaaaatatattgttagtttgtggatttggatatggtgtaattgctatgttaaaggatagtttagtaaatgattaccagataaatatagtagagagtattccatcatataagttacaagattataaagaatgggaaagtattgacttcattataacaacatcaaagatagtaatagacttgcctaaaacaattattgagataaatccatttttacaagaagaggattatttgaagtttgaagaaaaagggataaaaagaaagaacgtcttaactaattatatgtcaataaaaaaaaggttggactttttagaagaagatgctcaaaaaagagtattaagtattatatgtcaagaacttggatacagtgatgagagaatattatttagacaacttaatttaagtgatttaatagggattgataccataaggataattgatgaagatatgaaatgggaagatgctgtaaaaattagttcaaacatacttgctaattgtgattttgtatcagcacaatatgctgagaatattatagatattttaaaaaatgtgggtttttatgctgtaaaagataacgaatttgctttactacatggcaatgatagttcattagtcaaagtaagttcgataagtttattaatatgtaaagaagcagttagttttggagataaaaaggttaaaatcatattttgtctagcaagcagagataaaaaagagcaaattcctgcaataattaatctaactaaaatggtttataagactaattttattgctatgttagaaagtgcaaagacaaaagaagaagcagaagttttaattcataaatatgagaaggaggtcactgtatgaataaattagttaatgtaaaatgttcatttaaaatacatgctaattcaaaagaagaagctattgtatcgttagttgatgtagtatcaaaagaaggatatctaatagataaaaatcaatttttggaagatgttttaaagagagaagaaacattgtcaacttatattggacatggtataggtcttcctcatagtcaaagtgtaggtgttaaaaactcttgtattacaataggaaagcttgatattcctattgaatggacagaagaaggagaaaaagtggatttaatatttttaatatcagtaacaaaagacaatgaaaataatcttcatttaaagattttatcaaaattagcacgtttattgatgcatgaaagttttagaaatcaaattagatgttcagatgaacaaactgtttataatcttataaaagaaaaaatagaggaggaagattaaaatgagaattttaaagtttttgcaaaaacatcttatgacagcaacatcttatatgattccatttgtggttgcaggaggaatattatttgctttatcagtaactctaagtggacaagctgctgttcctgaaacaggctggttggctaaactgaatcaaattggagctgctggcttggctttattcattcctatattaggtggatatatagcatttagtatggcagataaaccaggattagctccaggtatgataggtgcatatttagcaaaagaagtaaatgcaggttttataggtggtatcatagcaggatttatagcaggatttgttgttttacaattaaagaaaattaaattagctcctacaatgagaactttaggttctatatttatttatcctttgattggtacattgattacaggtggtataattgtatttttaattggagaacctatagcttcttttatgacatggatgacaaactggttaaatggaatgtctggtgtttctaaaattcctttaggtggaatcttaggaggaatgatagcctcagatatgggtggtcctataaataaggttgctgctacttttgcccaaactcaagttgacacacttccatatttaatgggtggagttggcgttgcaatttgtatacctccaattggtttaggattagctacattattgtttccaaaaaaatttagcaaggaagaaagagattcaggtaaagcttcgctattaatgggatgtgttggaattacagaaggagctattccatttgcaacatcagatccagttagagtaataccttgtattatggctgggtcgattataggaaatattatggcttttttattaggatgtttaaatcatgcaccctggggaggtctgatagtattacctgtagttgacaataggttggggtatattgcatcagtattaactggagcagtagttgttgcagtattaatgaaattagtaaaaaaagacgtgaaagaagatgaagaaattgaagaggatttagatgaatcaattgaattaatatttgaagaattataaatataaatggaaggaatttgtataaaaaagtaaatataaaactataaacttaaaggagataagaatatgaaaattgtagcagtaacatcttgtcctagtggagtagcacatacttacatgtcggctgaatcacttgaattatcggccaaaaaatttggtatagaaataaaggttgaaactcaaggaagctctggaatagataatgaattgtcacttaaagatattgatgaagcaacttgtgtaatattgactaatgatgttgagattagaaatatggaacgttttaagggaaagaaggtagtaagaatgagtgtatctgagataattaagaaatctgatgcattaattaagaaaataaaagatacttttcaataaaaattgatttattttacatataactcaaagatgtttttaaagaaatttttattaaaagcatctttgaaaatatcttaaaaatagaataaaaggagatatagtcatgaaaaaattaccaataaagactgtcgtacaaagattactagacttacaagaagaggggaaaagtgcaactcttttaggaattggtcctatgtcaccaaacttgttacaagcaagttttgaactagcaaaagatgatgattttcctttaatgtttatcgcaagtagaaatcaagtagatgcagatgaactaggtggcggttatgtaaatggttggaatcaggaaacttttacaaaagatattaagaagattgccgacaaagttggatttgatggtttatattatttatgtagagaccatggtgggccatggcaaagagataaagagagaaatgaccatttgtctgttgatgaagcaatggagttaggaaaaaaatcttatttagcggacattgaagcaggttttgacctattgatgattgaccctacaaaagacccatttgaaattggaaaagtaattccactagatgtagtactagaaagaactgtagaattaattgagtattgtgaaaacgagagaaaaagacttaatctaccagacataggttatgaggttggtacagaggaaaccaatggaggtcttacttcaactgagacgtatgaaacatttataactagactaaaggttgaacttgataataggggtttgccaatgccaacatttatagttggtcaaactggtactttaactagaaagacagaacaagtaggaacttttaattttagaaatgcttatgatttagctcaaatggctaagaaatatggagttggtttaaaagagcataatggcgattacttagatgatgtaactttattagaacatataccatctcaaattattgctacaaatgtagctcctcaatatggtactgaagaaactagggcatatttaaaattagcagaagttgagtgtaaattagaaaaagagggcctagttgataaaacttctaatatcagacatgttcttcttgttaatgcaattgaatgtggacgttggagaaaatgggtagtaggagaacaaaaaaatctaactactgaagagatatttaagaatgaagttttatctaatgaaatactagatattgcaggacattatacatttaataatgatgatgttaaaaaagaaatagaagtgctttatgataatttaagtaagaataatattgatggtcaaagatttgttgtagaccatattaaacgtcctttgcgtgattatgcagaatgctataacttaaaaggtgttactacgaggattttaaataaataataggacttatagtggtgagtattgttatactaggtatttatagttataattatacttaccactattaaatttaggaggactaatattttgattaatttaatttttgatgtagatgatactttatataaccaattaacgcctttttacactgcatataataaagtgttttcttcaataaaggatatttctattgaagatttatatatgagtagtagaaagtatagtgatgaggtatttcatatgactgaaaatggagaaatgccaatcaaagaaatgcatatttataggataatgaaagcttttgaggagttgggaaattctattacagaaaaagatgcacaaagttttcaagatgagtatatatatcagcaatcacaaattacactaataccagaagttgagaggattttaaatttttctaaagaaagaaatattaatctaggaattataactaatggcccatcaaaccatcaaagaatgaagttaaagcagttaaatattgaaaattgggttgataaaagtaatatttttatttctagtgaggttggattttctaagccagatactaatatttttagagtagctgagaatgttatgaatttagatagagaaaatacatattatgtgggtgattcttatagaaatgatgtattaggtgctaaaaaagctggttggaagagtatatggttgaaccatagaggacatgaggtagaagagttgttttataaacctgattttgtaattttggaacataaggatttgatatctttatttataaaaatatgtagttataaaaatatgtagtaaaaaaatgttaataatagaattgtataaaataattaataataactatataaaattatatgtttagattgtgagcaatctattttatgttaaaaatagattatttagaagaaggggaaatcttaaaaaaatttgaatatcccctttttattatttaattaaaatgaaatagttagaaatatattttatttagtttagtcaataacattttgggattctttataactacatgttaactgttgaataggcttatcatatggtttaacccatcctttattaatacttaattctgtaagtgctgtgtgaccttctaccatttgagttagtgaagctgaatatatagctcttaattcaggtgtactacttgttaatgcagaattaagatacatattggcagatgctttagcagatgaaagcatacttaacattattactttatcgtctatataagtattgttcttaattagattttctatcatatttctcatgttatctatacctcctcagaaattagtatttcattttcaactataaattgttgtatagctttaattcttccttctgttgctaatatactagattctgattgtctttttaggtcttcatctgatattaacatatttattgctctttgcataagtaatccgtcagactccatttttataactgctgctaaagatattttttcagtttctgaaagtgttctcatttaatcatctcctatattgtaatttatgctttaatagtatgtctttcttttcaaggaaataaccattacacttttttacagtattttatattctctttatatcaaagtttagtcaacttaatatattaatataattttgtaggatatttatcattaaatatctataaaataaattatttgaatattcataaatcaaaatttatttgtatgtacttcttcaagagtcaatatgaattttttcaaaaaattaattttgatgataatcattaagggctatatttttcctaaagttgtgattatcattattaatttactaaaatactttaatgaaaaatagctaactttaattgtaggatattcttaatatatttgaaataaataaaaatattgaaggatataatattcaattggtatataaataataaatgatagttaagatttaccttagaggctaattaggtgttcagtcaaaattaatgcctttagaatacaaatgtattctaaaggcatttttactatgtattttcatttatattactaaacattatctatttttatatacatttctatgtattttattttcatcaaatcggtctataaattcatttttttcttcactatatccaatagatataagtgcataaggaactaattttactggtaagtctaaaatttgtttaactttatttactactttatttttaggaaatactcctgcccaacaagcagctagaccttgattagtaacttctaataataaattttgtgtgcaagcacctaaatcttgtatccatttaccaggttttaagaatttatctctatttccaagcactactatacataatggtgcaaattctatatgctttgctctatgctgtgactttgagagctctttcagcagttccttatcatctactataataaattcccaaggttgagcattttttgatgaaggtgcttgcatagctgattttagtatttcagttattttatcttcttctatatttttatctatatatgttcttattgaacgtctattttttataacttctaacatacagattctcctttaaataaaattatttctatttatataatatcattactttaagttttagctattacttatataaagaataaactttgtgttggttttatctaagtaaaagtaacattcagaactaaaaaacaagactataaatccaagatattaattaaaaaagaagtaataaaaaataatatacaagatttaaaaaagagtattgagcttaaaatttaattagaaaaccaattttgagataatctgttttttattttaacaaaaaaacataaataaagttcgatacgtagcgaatgaaaaaaatacaagaaatattttttttaaaaaatttcaaaaaagagttgataatatatgtatattaatataaaatttaaggtgtataattcgtataataatacgaatgatttgtagtgtaaaataacttataaacggagaggggaagtctaatgaaagtagcagtagttatgggttcaaaatcagattatccaaaattagaagaagggataaaactgcttgaaaaatatggaatagaggttgtagcaagagcattatcagctcatagaacaccagaacaactttcaatattcctaaaagaaatagaagatgatactgatgtaataatagcagcagcaggaaaagcagcacacttaccaggtgtaatagcttcacaaacattaattcctgtaataggattacctattaaatcatcaactatggatggactagactcacttttatcaatagttcaaatgccaaaaggaatcccagttgcaacagttacaatagacttaggtttaaacgcagctttattggcattacaaataatgactttaaaatacccaaaattaaaagaggatttgaaatcatatagagaagagatggcacaaaaggtgttagaagacgacaagaatttaagggggtagcagaaatgttattatatgaaggaaaagcaaaacaagtatattctacagataatgaaaatgaatatgttgtttattataaagatgatgcaacagcatttaatggagaaaaaaaagcagaaatatcttcaaaaggtatactaaataataagatatcaacaataatctttgaaatgttaaaagaaaataatataaatactcactttataaaaagtttatcagatagagaaatgttagttaaaaaagtagagattttaccattagaagtaatagtaagaaatattgctgctggttctatctgtaaaagagttggtcttgaagaaggtgtagttttcgatgagccaatttttgaaataagttacaaaaatgatgcttatggtgacccaatgctaaatgatgattatgcagtggcaatgaagttagcaactagagaagagttaaaattcttaagagaagaaactttaaaaataaacgagttactaaaagcatttttcttaaaattaaacctaaagttagttgactttaaaatagaatttggtaaggattctgaaggaaatataatattggcagatgaagtatcaccagacacttgtagactttgggatgtaaatacaaatgaaaagttagataaggacagatttagaaaagaccttggagaccttgtagaaggttatacggaagtactttcaagaatgaataataaataggaggcaaatgtatgtgtggagttttagggatttactctaataaagatgtaactaaagaactatattattctttatattctatgcaacacagggggcaagaaagctgtggtttagctcttttagatgatggagaaattaagtacaaaaaagatatgggattagttggagatgtttttaaggaaaatgaattatctaagttaaaaggaaatatagggattggacatgttagatattcaacagctggaggaagtcatgtttctaactgtcaacctttagttggaagttgtagaaaaagacaattagccatagctcataatggaaatctagttaatgcaaattatttaaaagatatgctagaagaagatggatatatgttccaaactaattcagatacagaagtgattttatatatacttgctagatattacaaaggggatatagtagaaagtttaaaagtgacaatggattatataaaaggtgcatatgctcttgtaataatgagtcaagaagaattggttgcagttagagacccacatggattcagacctcttgtacttggtaaaaagggtgatgaatatatatttgcatcagaaaattgtgcaatagatatacttggcggagaagttataagagatgtagagccaggagagataatagtagtcaaagatggagaactaaaatcatatttttattcagaaaattataaaccagttaagaaaagttgtatatttgaacacatatactttgcaagaaatgatgcaactatagacaatgtaaatgcatatgaatttagaattaaatgtggtgagagattagctcagaatgaaactgtaaaggcagatatggtagttccagttccagattcaggttggccaggagctattggttatgcaaatgctagtggattaaaaataagtgaaggcttagttaaaaatagatatgtaggaagaacatttataaaacctacacaagaagaaagagaaatagcagtaaaaataaaattaaatcctctttcaacaataataaaaggaaaatctataattttagtagacgactcaattgtaagaggaactacatctaaacaattagtaaaatctttaagagaagcaggagcaaaagaaattcatcttagaataacttctcctccagtagcttactcttgttactatggaatagatactccaaatcgctctaaattaattgcatcaagtaacaacgtagaagaaatgagagaatatattggatgtgatagtttaaaattcctagatatagaaggaatgttagatgcaacagaacataagtctactttctgtaaagcttgttttgatggagaatacccagttaagaaaattgataaggaggaactactttcatgttaacatataaagaatcaggtgtagatatagatgaaggaaatagagcagtagaccttataaaaggtaaaataaaaggaacttatgatggaaatgtagttggagatttaggtaacttcagtggattatacagtttaaaagattttgtaggtatgaaagaaccagttttgcttgcatctacagatggtgttgggactaagttaaaaatagctcagatgatggacaagcatgatactgttggaatagatttagttgcaatgtgcgtgaatgatttaatttgtcaaggagcaaaaccattatttttccttgactatatagctcttgggaaattagtgcctgagcatatcgaaaaaatagttggtggaattgcagatggttgtaaaatgtctggttgtgcactaattggtggagaaactgctgaaatgcctggaatgtatggagaagatgactatgatttagcaggattttctgtaggaatagcagacaaagaaaagattgtttctggaaacaatgttaaatcaggagatgtattggttggtatatcttcaagtggagtacacagcaatggattttcttttataagaaagatatttttagaaacttacaattataaaatggaacaatatgttgaagaactaggaatgacagttggagaagcacttttaacaccaactaaaatatatgttaaattagctttagatgtattagctaaacatgacataaaagctatagctcacataactggtggagggcttatagaaaatataacaagagttatacctaaagggttaggactagatatcaataaaaaatcttgggagaagcctcctatatttaaaatgatagaaggttttaatgctgttgatgagagagaacttcataagagttttaacatgggtattgggctagttttaatagtagataaagaaaatgctgatgatgttgtaaactttataaataatagagaaaatgacaatgctgcttatgtagataaaaaatacagtgaattattagaagataaagcgtatataattggtgaagtagtagatagtcatgaaggtgtagaattatgctaaatataggagttttaatatctggtggaggaacaaatttacaagcagttatagatggcactgagtctggagaaataaaaggtcaggttaaagtagttatctcaagtaagcaaggtgcttatgggctagagagagctaaaaatcataacataaaagcaatttgtgaaactgatgaagacaagataatagagattcttaaggaaaataaaatagatttagtagttttggctggttatttaaaaataatcagcccaaagctggttaatgagtttagaaacaaaatgataaacatacatccatcattaattccttcattttgtggagctgggttctatggagaaaaagttcatcaaggtgttatagattacggagctaaagtaactggtgctacagttcattttgttgatgaaggtgctgatactggaccaatcataatgcaagatgtagttaaggtaaatcaagatgatgatgcaaagacacttgcaaaaagagtgttagaagttgaacataggattttaaaagaaagtataagtcttttttgtgaaaataaattaaaacttcaaggtaggagagtgtttataaatgagtaagagagctttaataagtgtaactgacaagactggtgtagtggaatttgctaaggagttaaataagttagattatgaaattatatctacaggaaatacatttaaaacattaaaagaaaatggtgttaatgtaatgcaagttgaagatgttacaaattttccagaaatattagatgggagagtaaaaacattaaatccatatatacatggtggtatactttataaaagagataaagaatctcatgtagaaactgtgaatgagcataaaatacattcaatagatttagtagctgtaaatctatatgattttgaaggaactttaaaagctggaaaaagtcatgatgaaataattgaaaatatagatattggtggaccatctatgatacgttctgctgccaaaaactataaagatgtaatagtagtagtagatataaaagattatgattctataatagaaaaattaaaaacagatacaatgacattagaagacagaaaaaaattatcatataaagctttctcaactacaggaagatatgatgcgttaatatctagttattttgctggagaagttggagatacatatcctgacatattaaatttaactttccaaaaagaacaaactttaagatatggagaaaatccacatcaaaatggtttcttatattcacaatcaaatgcaaaaaatccaatcttaaattatgagcaattaggcggtaaagaactttcttttaacaatttaaatgatttacatggatgtttagaagtaatgagagaatttaaagatagtgaagaagtagtttcagtagctataaaacatgctaattcatgtggggtaggtctaggaaaagatgcttttgaagcatatacaaaatgttatgaagcggataaggtttcaatatttggaggaatagtaggaataacttctactatagataaagctacagcagagaaattaaatgaaatattcttagagatagtagtagcatatgattttgagccagaagctttagaggtacttaaacaaaagaaaaatttaagaatattaaaattagctaagatagaagatagtttacaaccatatgaaatgaaatatttagatggaaaattattaatacaagatagaaataatatattagcagaaaaaagtgaaaatgtaacaaaagcaaaaccaacagatgcacaacttaaggacatggaatttggtatgagagtagtaaaaaatatgaaatcaaatgcaattgcgatagtaaaaaatggtcaaactttagctttaggttgtggacaaacatcaagaatttgggcattaaaaaatgctcttgaaaataacaaagataaagattttacaggagctgttttagcgtcagatgcatttttcccatttgatgattgtgtaacattagctcatgaatatggaatatcagcagtagttcaaccaggtggctctataaaggataaagattcaatagaagcttgtgataagtatgatatggttatggtatttacaggaataagacacttcaaacactaaggaggatattatgaagatattggttgtaggcggtggcggaagagagcatgctatatgctggaaactaagcaaagaaaaaaatgtagaaaaagtttattgcgcgccaggtaatgcaggaattacaaatgtagcagaatgtgtaaatataggtgatactaatatagaagaacttttaaaatttgccaaagaaaatgaaataggtctgacaatagtaggaccagaagtaccactagttatgggaatagtagatgagtttgaaaaagaaggattaagagtatttggacctaataaaaaatgtgctcaacttgaaggaagtaaagctttttcaaaagaatttatgataaaacataacatacctactgcaaaatataaagaatatacaaacttagaagaagctatatcagaaatagatagttttggatatccagtagtaataaaagcggacggattagctgctggaaaaggtgttgtaatacctgaaaatagagaagatgctatagcaactttaaaagaaatgatgtcagataagaagtttggagctgctggagataaaatagtaattgaagagtttttaaaaggaatagaaacttcaattctagcatttgtagacaatgatacaatagttcctatggcaagtgcaaaagaccataaaaaagtaaacaactatgagcaaggtccaaacactgggggaatgggaactttttcacctagtgaaatatatacagaagaattagcaaataaagtaaaagagacagtattagaaaaaactttagaaggcttcaaaaaagatggacttaattttaaaggtattttatttgttggtcttatgataactgaagatggagaaaaagtacttgaatataatgtaagatttggagaccctgagacacaatctgttttatttagattagaaacagatttacatgagataatggaaactatactagataataagttaaaagatatagaaataaactatagtgatgatgaagctgtatgtgttatgcttacatcaggagggtatccagacagttatgaaaaagggaaaattataactggtcttgaaaacttggatgatgatatagtagtattccatagtggcactaagatgcttgatggtaatttagttaccaatggaggaagagtaattggtataactgcaaagtcaactacagttaaggatgcagcagaaaaagtttatgaaaacataaagaagataaactttgaaggaatgcactatagaacagacataggaagataatttttctaaaatggaggataaggtatgttgaatactgaaaataaagactcaatggttagaagagtattagttgaaaaaagagaaggttttgaccttgaggctaaagctttaaaaaaagacttagtagaaagtttacacatagataatatagaaaatttaagaatattaaatagatatgatgtagaaggaatatcagaagaagtttatgaaaatgcagcaaagacaatattctctgaaccaaatttagatgtagtatattatgaagaaataccaaaattaaatgatgaaagagtatttgcaatagaatttcttcctggtcaatacgaccaaagaggtgattgggcagctcaatgtgtacaaattgtaaatcaagggataagacctgctattaatacagcaaaagtttatatattatcaggcaaaataactgatgaagagttttctaaaataaaagattactgtataaatccagtagatagtagagaagcatctttagaaaaaccagaaacattaaaaatggaaactgaaataccaacaacagttgaagtattagatggatttatagatttagatgaaaatggattaagaacatttgtaagtgaaaaaggattagcaatgactttaggagacttacaacacgttcaaaaatactttaaagatacagaaaagagaaatccaactataacagaaataaaagtattagatacttattggtctgatcattgtagacatactacttttatgactgaaatagaaaatgtaaagatagaagatggtaagtttaatgatatagtaaaagaagcgtatcaaatgtatcttaactcaagagacaatgtatatgtgaacagacataaagatatatgtttaatggatatagccactgttgcagtaaaagaattaaagaagaatgggaaattaaatgacctagatgaaagtgaagaaataaatgcatgtagtataaacgtagatgttgaagttgatggtaagatggaaaaatatctagtaatgtttaaaaatgaaactcacaaccatccaactgaaatagaaccatttggtggagcagctacttgtttaggtggagctataagagacccattatcaggaagaagttatgtttatcaagcaatgcgtgttacaggaagtgctgacccaagaacgactttagaagatactttacctggaaaacttatgcaaagaaaaataactacagaagctgctcatggatatagttcatatggtaaccaaataggtcttacaactggacaagttgcagaagtatatgatgaaaactttgttgcaaagagaatggaaataggtgcagttatagcagcagtaccaaaagagaatgtagtaagagaaagacctgaagcaggagatgtaatagttcttcttggaggaaaaacaggaagagatggttgtggaggggcaactggttcatctaaagaacatagtgaagagtcaatcttaacttgtagtgcagaagttcaaaaaggagatgctcctaacgaaagaaaaatacaaagattctttagaaataaagaagttgctcaaatgataaaaagatgtaatgattttggagcaggtggagtttgtgttgctataggagagattgctgatagtttagatataaacttagacttagtacctaaaaaatacgatggacttgatggaactgagcttgcaatttcagagtcacaagagcgtatggcagtagctataaaaaaagaaaataaagataaatttatacaattagcagtagaagaaaacttagaagctacacatgtagctacagtaacagatacaggatatttaagaatgttctggaatggaaaagcaattgtagatataaatagagagttcttagatacaaacggagtaaaacaaactactgatgtccatgttactaaagtagatgaagaaaatacattctttagctctaatgaaatagtaaaagatgttaagtgtgcaagtatgaaagacaagtttacaaaagtattatctgaccttaatgtttgttctcaaaaaggattagtagagatgtttgataatacaattggtggtaatacagtacttatgccatttggaggaaagtatcaagcgactccaacacaaggtatggttgctaagataccagtacttggaggagaaactaatacttctacaataatgacttatggatataatccaaaggtaggaaaatggagtccattccatggtgccttgtacgcagtagtagaatctgtgtgtaaattggttgctattggaggaaattatagtacaacaagacttacattccaagagtattttgaaaaacttggtaacaatccagaaaaatggggtaaaccattctcagcacttttaggagcattttatgcacaaagtaaatttgagatacctgctataggtggaaaagacagtatgtctggtacatttaaagatatcgaagttccaccaacattagtttcatttgctgttgatacagtagatgcgaagaaagtagtatctccagaatttaaaaaagcagactcaaaagtagtaatgttatgtgtaaacaaggcagaaaatgatgttgtagattttgaggaattaaagagaaacttagacaaagtaagagaacttatacatggaaataaagttttatcaacatatgcattaggatttgcaggtgtaggtgaagcaataagtaaaatggcttttggtaataaaataggatttaagtttagtgaagaagctgaaaaaacatttacagatgataaattatttgaggctagttatggaaatatagtacttgaattagcaaatgatgatttatgtatgttagaaggatacaattatgttgtgcttggaagtacaactaaagaagctagtatatttatcaaaggtgaagaacttgcattagatgaattatataaagcacactgtagtactttagagcctatattcccaactaaaacagaagaagtaaaatcaaagatagagactataagttatatatcacaaggagaagctaaaaaatcatcattaagtatagctactccaagagtatttataccagcatttcctggaacaaactgtgaatatgactctgcaagagcatttgaaagagtaggagctaatgcaaacataagagtattcaagaatttaacttataaagacatagaagattctatagatacaatagtaaacgaaataaaatcttctcaaataataatgttaccaggtggatttagtgctggtgatgagccagatggttctggtaaatttatagctactgtatttagaaatcctagagtgcaagaagctataaatgaatttttaactcaaaaagatggactaatgttaggtatctgtaatggattccaagtattaattaaattaggattagttccatatggagaaataagagttccaagtgaaagtgctccaacacttacttacaataatattggtcgtcatcaagctaagattgctagaactagaatttcatctaataaatctccttggttagctcaaactaatgttggagatattcataatatagcaatttctcatggagaaggtaaatttgttgctagtgaagatgttatgagagaattaattgctaatggacaagtagcaactcaatatgttgactttaataatgaagctacttatgatattgagtttaatccaaatggttcattctatgctgttgaaggtataactagtgctgatggtagagtgtttggtaaaatgggacattctgagagaattggtgaggaagtatttaagaatattataggtgaaaaagaccaaaagatatttgaatctggagttaaatattttagataaagctttgatgtttaattgatagctagaatatataatttagatatttagatttaaagagatgtaataatatgatgataatcatttaatattacatctcttttttatttatctaagaaataataagttcaacctaagttaaaatacaagctgtgttataattaattactaagtaaaattaaatatttattggagggcaacataattaatgaaaatattaataacagggtctaatggtcaattaggaaaagaattggttagccaattagaagcaatcaatcaaagtataaatcaaccaaaatacgttatattagctacaacaagaaatgatttggatatatccaatcagactaatatagataattttattttgcataataaacctgatgtaattgtaaactgtgcagcatatacaaaggttgatgcatgtgaagataatatcgaaattgcgtataaaataaatgccttaggagtgagaaatttagcaatagcatcagaaaaagttaatgctaagcttgttcacatatcaactgactatgtattcaatggtttttctaaatatccatatagggaagacaataaaactgaacccaattctgtgtatggaaaaagtaaacttatgggagaaaagtttgttgaacaattctcacataagtactttatattgagaacagcatggttatatggtaatgggaataattttgtaaagactatgataaaactttctttagaaaataaagaggttaatgtggttaatgaccagtttggaaccccaacaagtacagtagacttagcaaaaattataataagaatcatggaaacagaacattatggagtttatcatgctacatgtgaaggtgagtgtagttggtatgattttgccaaaaagatatttgaattaaaaaatatagatataaaagtaaatccaattaagagtaacgaatttaaatgtaaggctcaaagaccactatattctgtattggataattttatgttgaagttaattggtttaaattcttttagaaagtgggaagaatccattgaagaatatttagaaagatatgatataaatgaaaagtaaatgtattatttttagaaaagaaaataagatattataaaaaatataaatatttcttttatttatccgataatcataatatgacaaaaacaaatttaaggatggaaaaagatgaaaggaattattttagcaggagggtctggtacaagactatatcctataacaaaatgtatatcaaaacaaacacttccaatatacgataaaccaatgatatattaccctatgtcggttcttatgttggcagggatacaagatatattaataatatctacaccaagagatataaaagcatttgaagaattatttggagatggaagttcactagggcttaaaataacatatgcaattcaggagaaagcaaatggaattgcagaagcgtttataataggagaagaatttataggaaatgacagagtgtctcttgtattgggggataatatattttatggatatggatttagtgaaaggttggagaatgcagttaaaagaaaaggagcaactatatttgggtatcatgtaagtaatccaaattcgtttggagttgtagaatttgataaggattttaatgtattatcaatagaagaaaaacctacagttcctaaatctaattatgctataccaggattatatttttatgataatgatgttgtagagatagcaaagctagttgaaccatcagatagaggtgaattagaaataacctctataaacagtgaatatctaaaacgaggaaaactaaaagtggaacttctaggaagaggtatggcttggcttgatactggtacacataaaggtctattggatgcttctaactatgttgaagtggttcaaacaagacagggactgtatatagcatgtttagaagagattgcatatacaaaaggatatataagtagagaacaattaatgaaactagccaagccactgataaaaactgaatatggtcaatatctattaaaattggctagtgaagatatgcaatatggtagataaaatttattataaattttattaagggagtttgttataatgggaaaaatcaatgttataaagactaaaatagaaggattatatatagtcgaaccaaatgtattttgtgatgaaagaggatattttatggaaagctataataaaaaggattttatagagcagggtcttgatatgtgttttattcaagataatgagtctagctcaagaaaaggtgttttaagaggaatgcattttcaggttagatatcctcaaggaaaattagtcagagttacagagggagaagttttcgatgttgcagttgatttaagaaaagattcacagacatttgggaaatgggaaggtgtaatattgtctgataagaataaaaaacaattttatattccagaagggtttgcacatggatttttagttttatcagaaaaagcagtatttaattacaaatgtacaaactattattatccagaatttgagcatgggtttatatggaatgacaagcaaatatctattgagtggcctttaaaaggaattgaagaaatatttttatcagaaaaggacaaaaaacaaaaaagttttaaagatatttgtataagacgttaataaaaatttattagaattaacatttaggagaaaaaatatgaaaaaaatactgataactggaggagcaggatttattgggagtaactttgtacattatatgcttaacaagtatgtagattattttattgttaacctagacttgttgacttatgctggtaatttagagacattaatagaaatacaagacagttccaattataaatttgttaaaggagatatttcaaatagggaacagatgtataagctatttgaagaagaaaggtttgatatagttgttaactttgccgctgaatctcatgtagataggtcagttgagaatcctgatttatttattaaaacaaacattataggaacacaagtacttttagatgcatctataaaatatggagttaaaaggtatcatcaaatatctacagacgaagtgtatggtgatttaccaattgatagaaaggatttattctttacagaacaatctcctatcaatccaagttctccatattcagcttctaaagcatcagcagatttgttggtaagttcttattatagaacatatggattgttaacaactatatctaggtgttccaacaattatgggccatatcattttcctgaaaaattgatacctcttatgattttaaatgctttggaaaacaaacaattgccagtatatgggaatggggaaaatgtaagagattggttacatgtatatgaccattgtactgctatagacttaataatacataaagggaatataggggagatttacaatataggaggtcataatgaaagaagtaatttagaagtagtaaaaatgatattaaatcttttagataaatctgaagagttaatatcctatgtaaatgatagacctggtcatgatttaagatatgctattgatgcaactaaaatagagaatgagttaggttggaaggcaaaatatgactttgatttgggtataaaagaaactgttaagtggtatatagaaaatgaatcttggtggaaagctgttttatcagtgtaactttgaaatttataaaatttagaaaggggcgttttatattgaatgagataagttcactaattaatatattagcattgactcaattatctggtagtaatactacaaatcaatgtaactgtacatataatagttcatctggatttgatatgattatgatgaccttgttaaaagcattatcacaaaataatcaacagacttctaatggctacaatttatcgtctaattctgagaatttatttgacgaactcggcagtgtagtaaataatacagctagtagatttatagatgttgatacaaaagataaaagtgtaaaatcaagaattgaaaatgctatagagcaagcatcaaaaaaatataatgtggattcgaatcttataaaagcaataattaaagttgaatcggattttaatccaaatactgtttcttctgctggtgctaagggtcttatgcaacttatgccagaaaattgcagagacttgggggttacagacccttttaatatagagcagaatatagatgctggaactagacatattaaggaatacattgatatgtttggagggagcatagaaatgggattgatggcatataatggtggtcctggaagaatgaaaagtagaggagtagaatcaatctctgacctgtataaaatgccaaaagaaacacaaaattatattcctaaggttatgaaatattatagagggtaggctttattatggggataaatatagataagctaaacataagtccaagtataaatatggaggttaaaaaactaaaagagagtaataaattttctgacaaattaaactctttaaaacaatcttcttcattggaagatataaaacgaaatttggaaagtgtaaaaaaggcaggagaaaggcttgtacttactcaaaactatggcgacattagtatatataaaaatgcagtaaaagaatacctaaaatctgttgtagataatatgtattcacttgataaaaatagtagcttttgggagcatcagtattataagaatgtaaagattgttgatagtaaacttgaggatatgactagtaagttaattagtgaagaaaaagaaaacatagatattgtttctactgttgatatgatacaaggcttgttgatagatatgtatagataaggttatacaaggagaaaagttttatgaatagtaaaaaagaggatatatatgaattgaattttgggcaattaatagaagaaaaatctggtgttatagaagaaaatcaaaatgtttttaatgcaaaagtaaatgtagctgtttctataggaaatacaacagaaacaataaaaaatatattagatttaaaagaaggctctataataaaactaagtaagaatgtggatgaaaaattagatatatatgcaaatgatagattgtttgcttatggagaaagcattattacaaatgagaagttatctgtaagattatctaaaatagaagattcagatgtaaattagtattttaaatagtatccctttaggctatgatgtatgagtttagctaaggggatatttttataaaaaatttaaaatatgcgtgaattatataaatgtttttattttatgagcgataattaaattataagtatgtaattttggaggtgaaactatggatattaaaaatgtaagttcaaatattgtagtgaataattatttaaagaatacatctggtgtaaaaaaagtggaagaagttaaaaaaattaataaaacagacaagatagagctatctaaatttgcaaaggaaatggcaagtgtgtcaaatatgagtgatgagaatattaggaataaaaaagtcgatgaaataaaaaatgcattagaaaatggaacttacaaaataaaaccaaaagaaattgcgaaaaaaatgatagaggatatgcgaggataaagtcatgattacagacttaaaagttataatatatgaagaaaaaaatataattagtaagatgatggaattattaaaagaacaatttgattatatagttgaaaaagacttagaaaatttaaatatgttaaatcctaaactagaagatattagcagggagcttgcatccatagaaataaagagaagacaactttttggtgatgatatttcaatgagtgaagttgttgaaaatagtaatgatagatatttaaaagaaatatatacagacttgaaacacattcttgctttagctaaaaatcaacaagaatcaaatgattctctaataaagaaagaacttatttttacgaaaaaaatgattaatttcataaaaccagctgataagcaaactgcaacttataattcttatggaaatattagaaaataaatattaggaggagaaatatggcaggattattttccattttaaatacagctaattcaggaatgaatgcgcaccaaaaagcaatacagacaatttctcataatataagtaatctagatacagacggttattctaggcaaaggactgagtttgctacaaatagtccaatgtatatgcctagtttgagtaattcaattgcaagaggacaattagggactggagtacacgtaacggatgtaacaagagctagaaatagtttttatgattaccaatttagagcagaagctcataagtatggtaatacagtttcaaagtatgactattataatactatagaaactataataaatgaaccatcagactatggaatatctgcaggtatagacgacttttttaaaggatgggaatcattagcaaaggatataaatagtgatagtaaaaaaagtctagtggtagaaaatgcatcaaatctagcaactttaataagtgaaagttataagaagcttaataagttaaagggagatatagacgataatataaactctgaaataaaacagataaatgacatgttaaaaagtcttgaagatttgaataaatctattgatgttatatctggttctggctctactccaaatgatttacttgatgaaagagatagaatattagatgacttaagctttaaattagaccttgaaaatagcgatgttaaaaatatgctttcagatggtaaattagaacttaatgaattaaaaaatgcagatggaacttggaaaacaggtgtatcaggaaccttacaaggcttgtttgaaatgcatggtaagattgatacatataaaagcgatttaaaagatgtatctgatgggttagctaagcagataaatgatgtttataatacatctgctggaataacagtaacagatttttttataacttcaaatgtagatggtgaagatatcataaaggtaaatccagctataaagagtaacccaaatgaattaaaacttactgctgatgaggcttcaaagattgctaagttaaaggatgaaaaaatagatattggggtggctggtggaaaagtaagtacaataagtgaccactataaagcctttgcagaatcagtaggtttagattctcaaaaagtgaatcaagatgaagtgaatcaacgtaaaattataaataatattgataactcacgaatgagtgtttcaggcgtatctttggatgaagaaatgacagagcttataaaaatacaacgctcctatcaagctagtgcaaaagttatgtcaacagctgtgcaactgttggatgttgtaataaatggaataatttaatagaagggggaatttataatgagagttagtacaggtatgatgtctagcaactatctaaactcactacaagataatctacaaagattagataaggttaatagacaagttaatacaacgaaagaaataaacaagctatcagataatccatataaggcaataaaaatattgaactcaaaaagtgaaataaaaactatggagacttatgttgagaattgtaaagatacagggaattggttagaaactactgatactgcattagatcagcttggaaaattattatcggacataaagaaaactttggtggcaagtggtgatggtgcatattcagatgatgagctaaagactcttagtaatgaaactaatgaaaagatgaaagaaattgcaaatgccttaaatgcaacacatgaaggaaagtacatattttcaggttcaaatacaggtgtaccacctgttgaatgtatagataatgctgacggttcagtgagcttaaagtttaattctagtttaaatcttaataaattaaatgactctttgagtatggatatagctcaaggaataagtgtagattataatgttaaattgagtagccttggatttgacccaacaaagactgacccatttgaagagttaaataatatatcaaagaaattagcaaatccagatgctgatgctataaaagagctgacaacaacttgtttaggcgacatggaacaattaatagaaaatacagtaaatgttaggtctatatatgggacaaaagcaaatacagtagaggctatgaaggaaaaaaatgatgatagtttgatacagttaaaggatattttgtcacaaaatgaagaaatagattatggagaaaaactcgttcaattaaaggcagcagagttaacttatcaagcttcactacaaacaggaggaaagttatttaatgtatctatattagattacatatagtaaaataacgcagatatgatgaaggttacattaaaaaaaggtatattaggttttgaaaatttaaaagaatatgagcttttagatatagaagataatgattctttaaaagaatttaattctactgaagaagaaggtataggatttgttgttgtatctccatttgagattatcaatgaatatgaaatagttttaaatcaggaaacaatagaaaaactagaagtgaaatctccaaaggatgttgtactatttaatataattactcttggtcagacatttgaagaatcaactgtgaacatgaaagctcctatagtgataaatataaaaactaattttggaatgcaaataattttacaggatgataaatattcaataaggcatccattattgagaggtgataatggatgctagtaatttcaagaaaaaaagatgaagcagtacttataggagaaagcatagaagtaaaaattgtaggggtagatggaaacaatgtgaaactagctatatcggcgcctaacaatataagtatattaagaaaagaaatatacgaaaaagtaaagagtgagaatataaaagctacaaataaaaatataaaaattttaaagtcattaaaataataagcttggaggaagtaatatatgtatggagaaaatccttataattcttataaacaaaatgctgtttttatggcatcaaaggaacaattgttacttatgcttgttgatggagcagtaaaatataccaaaatagccagagcagctatcttagataaaaatacacagaaagcgcatagagaacttgtaagagttcaggatatatttacagaactaatggttacattagaccaaaatgcaggacaatgggcaaaggatatgtacaaagtttatgattttgtaagatatgaactttcaagagccaatattagaaaagacatccaggtaatagataatgtgttgcctgtaatagaacaaattaaagacacatggcatgaagctgataaaaaaagtaaagaagaaagaagtaggtacaaataatggaattaaatttagctgaattagataagttatcaaaagaggaattactattgatgcttgtagatggcacagtaaaatataccaatatatccaaagaagctcttttaaataacgactatttgaaagcacataatgaacttataagagttcaaaatatatttacagaactaatgactacattagaccaagatgcaggtcaatgggcaaaggatatgtataaagtttatgaatttataaaatctgaattagcaatagctgatgaaaataaagatattaaaataattgatgatatattgccaatagtaaaacaaattagagatacatggcatgaagtttacaatcaactaaaaatataattagatggagggataaaggtatgtcaagtataagtcctataagagttacaggtctttcaggaaattttgatatggaaggcataatcgaagctagtatgattagagacaaggaaaaagttgataaagcaaaacaagaacaacaaatcgttaaatggaagcaagaaatatatagaaatgttatacaagaatcaaaagatctttatgataaatatctaagcgtaaattctcctaatagtatagtaagtgaaaaagcatactcttctacaagaataaccagttctgatgaaagtattatagtagcaaaaggctcagctggtgcagaaaaaataaattatcaatttgcagtttctcaaatggctgaaccagcaaaatttactattaaattaaattcaagtgaacctattgttcgacagttccctccaaatgccagtggagctagttctttaactataggagatgtaaatataccaatatctgaacaagatactacaagtactattgtaagtaagataaactccctttgcgcagataatgatataaaggcttcttatagtgagatgacaggtgaattgattatttcgagaaaacaaactggttcgtcatcagacattaatttaaaagtaattggaaatgacaatttagctcagcaaattgctaatgataatggtatcacatttgcaaatgatgctagtggaaacaaagtggcaagtgtatatggaaaaaatctagaagctgatgtaactgatgaacatggaagagtaactcatataagtaaagaacaaaattcatttaatatagataatattgactataatgtaaattcaaaaggaactgcaaagttgacttctgtcactgatactgaagaagctgttaaaaatatgcaagcatttgtggatgattataataaactgatggacaaggtctatggtttagttactactaaaaaaccaaaagattatccgcctcttacagatgcccaaaaagaagatatgacaactgaagaaatagaaaaatgggaaaagaaagctaaagaaggtatacttagaaatgatgatgagttaagaggttttgttgaagatattcagtctgcattttttggagatggaaaaaatattattgcattaagaaaactaggtatcaatgaaagcgaaaattacaataaaaaaggtcaaatatcatttaatgcagatactttttcaaaggctcttatagatgatagtgataaggtatacaaaacactagcaggttattcttcgaattatgatgataagggaatgtttgaaaagctaaaagatattgtatatgaatattctggaagttcaacttctaaacttcctaaaaaagcaggtatagaaaaaactgcttctgctagtgaaaatgtatattcaaaacaaattgcagagcaagaaagaaatataagcaggttagttgaaaaaatgaatgataaagagaaaagactttatgctaaatattcagccttagaatctttgttgaatcagtattcttcccaaatgaattatttctcacaagcacagggtaattaattatggataaattaaaagaaaaattaaatttatataaagatatatctttacaaattataaatttgattgaaaaggaagaatatataaagataagtagtaagttaggtgaaagacaagagattataaatagtgtaagtgaaattgatagaaatgattttatacagctttataatagaatggaattaattgaaattgatagtaggataagagatattttacaaggacaattattagaagtaaaaaaagaattacatgagtataagcttactaaacaagtgaacacaatgtattataacttaaatagagaaaaagtaaatatttttaataaaaaagtataaagttatgtaccatcttgtccgattatataaatgaagaattaataaaaaagattaaaagtagaaatgacaaggatgtcaactatactaaggagggtaaaataatgagagttaatacaaatgtaagtgctttgatagcaaataaccaaatgggaagaaacgtaaatgcacaaagtaagtctatggagaagttatcttctggtgttagaattaagagagctgctgatgatgctgctgggcttgctatatctgagaaaatgagagctcaaataaaaggtttagaccaagcaggaagaaacgttcaagatggtatatctgttgtacaaacagcagaaggtgcattagaagaaactggtaatatactacaaagaatgagaactttatcagtacaatcttcaaatgaaactaatactgctgaagaaagacaaaagatagctgatgagttgttacaattaaaggatgaagttgaaagaatatcaagctcaattgagtttaatggtaagaaattacttgatggaagttctacagaaataagattacaagttggagctaattttggaacaaatgttgcaggaacaactaacaacaacaatgaaataaaagttgctctagtaaatacttcaagtataatgagtaaagcaggtataacaagttctacaatagcaagcttaaatgcagatggaacttctggaacagatgcagctaaacaaatggtgtctagcttagatgtagctcttaaagaattaaatacatcaagagcaaaattaggggcacaacaaaatagactagaatcaactcaaaacaacttaaataatactatagaaaatgttacagcagctgaatcaagaataagagatacagatgttgcttcagaaatggttaacttatctaaaatgaatatattagttcaagcatcacagtcaatgcttgctcaagctaatcagcaaccacaaggagttttacaattattaggataaaataattttgtatattggatatagaagaaagggtaaggctttgctttactcctttctttttttacaaatatacttttgaaaggaaaatatatatgttacttagtatagttatgattgttaaaaatgaagaaaaaatacttgaaaaaactttaaaatcattaaccacattaagaagttctatagagagtgaacttataatagttgatacaggttctacagatgatactataaatatatctaggaaatacacggaaaatgtgtactttcataattggaataatgatttttctagtatgagaaatatatcaatatcctatgctaaaggtgaatggttacttatattagatgcagatgaaatactaattgattcttcaactattgtgaaattttttaaagatggtcttgataaaaaatttaattcggcctcaatacaattaaaaaatctttactcatatgataaaaaattatatggatattgctcagtgcttagactttttaaaaacatcgattttagataccatggtaaagtacatgaacaaccaatatacaaaaaccctatatttaataatgttgctgattttgaacattatggatatttgtttgaagatgaagaaataagattaaataaagtaaaaagaaatgaaaaactgttatttgaagaattaaaagagaatgataattctccatatacaaattatcaattagggaaaaattttattatattaggaaaatatcatgaggctttatactatcttgagaaatcttatgaattatattctaaactagaatcggcacctggttacttgataacaagtcttgtaaaaacatatttatatttaggaaagcataagaagtgtgaaaaattgtgtctaaagtatattaagaaagacatgaataatattgatatatattattatattgcacaagcacaagtagatttagggaagtatgaaaatagtatagattcgtataagagatatatttatttgttagataattatgaaataagtacacaagcaaatagtttattttcagacactgatactgtagggcttagggatgaagctattattacactgataaagatttattataaacttgaaaaatatgagtctgtaatttcagagtacaataacattgaggatatggaaaagaagaagaatgtgtactttagcttatttatgtccctatacaaattgaacagatttgaagatataaaaaactattataaagaagtttcaaattctaaaattgaaaaaaatagtttttataaaaatatagaagaagttataaataatattaaagatgatgaaaaagagcatgtatataaaatcctttgtgacattgaaggtaattatggcattttaaatcagataaggataaataaatgtgtatctatagataagtgtaaagaaatactcaatgaagaaaaagaaataatttatgcatatattataaaagtagcttttgaagataagattgatttactagatattttttatgaaatggaatatgtatggatagagaaatacctaaaatatcttttagcactagaaagaagttttaatttagtactatataagtacataattagtcgtccgaatacatcagatataaaaaagataagagtatataaagctatatctaaagtagttttagaaagtataagtttaagtgatgaaaaatataaggagattttttatctttatataatgtattcttataagtacataagatacatatatagaaatttaagcgattttgaattaataaaatttgtttgcaatgatttagataagtttactatagaatttaagcatctacttgacattaaaaataaagtaaatgatgctaatgaaaaattagagtatatacatagtatgaggaaattactaaatgagtatcctttttataataaaataataaaaatacttataagtgaattagaagaaaatataaaagaaagtgaagaatttaaggatttaaaagatagttttattattagtatagaaaatatgattgaaactggcaaaataaatgatgcgaaatcattggtagatgactattcaaaaacatttatggatgatgtaaaaattttaaatataaagggaattttatatatgtttgaaaataagcttgataaagctgattttatgttaaaaaaggcattatcattagatgtagaaaatgaagatactatatataatatagaatacttaaaaagtttaagataagtcaaaaatgggagaattgaagaatgaatacaccaatagtggttaatgaaaaatctaaagatataataaaagattggcaatatacgtatacaaacgaagatataaaatttacaagcataataatattgacatataatcaaatagaatatactaaattatgtattgaaagtattaggaagtttaccccaaagaataaatatgaaataataataattgacaataactcttctgatggaacagttgagtggttaaagggacaatctgacataaaatctgtatataataacaaaaacctaggatttccaaaaggatgcaatcaaggtattgagttggctactggtgaaaacatattgttgttaaataatgatgtaatagttactccaaattggctttataatttgaataaagctttatggtctcaagataatataggtgctgtaggtcctattacaaatgcatgttcgtactatcaacaaattgatgttgattataaatcaattgaggatatgtttatgtttgcacacaaaataaatacatctaatattaacctatggaaatatagattaaagttagttggattttgcatgttaataaaaaaatctgtgctggataatgtaggggttttagatgaattattcacacctggaaattttgaagatgatgatttatcttttaggatgctagagtcaggatataagctattattatgccaggatacttttatacaccattttggaagtgtatcttttaaagaaaatcgtaataaatatacagatataatgtatattaatagaagaaaatttgaaactaagtggggatttaatccagaatatagtggaatgataagaacagatttgatttctaaaatagatgatagtttggaggcaaatattaatgttttagaaataggctgtggtataggggctactcttttagaaataaaaaatatatataaaaatgcatcaatatatggaatagaaattagtgagtcagcaggtaaacttgcaaagtatagtgcagatgtacttatagcagatatagaaaaagtaaagttggattatgaaaaagatttttttgattatataatattgggagatgtacttgaacatttaactgacccatggaagatagtcaatgaactgaaacaatatctaaagaaggatggttgtttgatatctagtataccaaatattatgcatgtttctgttttaagaaaccttgtgttaggtaattttacatatgaagattcaggaattttagacaagactcatttaaggttttttacattaaatgagataacaaaaatgtttaatgatagtaattacataataaatagtgttacagctactagtatgccactttcggaaattgataatagattcattgatacaatgtgtaaggaaagctgtaaagaaatgagacaacagtacgaatcttatcaatatatagtaaaagccactaaaagcatagatactaaaagatattctagtattagtatggttaatttaaaatacgctttaatgagaattgataatgaattagatgtagatagtaatttaagttatatatttgataattataatataactgaaccatgttttgttgatgatattgaatatttagttgatacgtttgtgataaataaagcaactctattaaatagattaggagttgaggcatttaacagaggtttaggagattttagtataaacatgtttatgacagtattagagatggatagagatgatattgattcaatatataatataacaagtgtattatgtgaattagaagaatttgatactgcttacaacttaattaaaaatagtagcaaaaaagtacagagtgaaagtgacatacaagatatactttattttattgaggggaagagatatgaataatgataagatatgttttataacctgtgtaaatgatgaaagactttatgaggaatgtcttgtatatataaatagcctagacattcctaaaaactttagcatagaaacagtagctttaagaggagccgattctattgcctctgcttataataaagctatgagagaaacagattctaagtataaggtatacttacatcaagatgcttttataattaataaaaatttcatatatgacattttagagatatttaaaaaaaatacagatgtaggaatgattggtgtagctggagtaaaagatatacctgtgaatggaatttggtgggattctgataaaaaagcagggaaagtatatgatagccatacaggtaaaatggatatttatgaatttagtaactttgaagaatgttttaatgaagttatggctatagatggattaattatgattactcaatatgatgtattttggagagaggataagtttgatgggtggcatttttatgatttgtcacagagtatggaatttagacaaaataaatacaaagttattgtaccaaaacaaaataagccttggtgtatgcatgattctggagtagcaaatataaataatggatatgatgaatataggataaaatttgtaaaagagtacataaatcttgatttatatagagaaaatttttatgaatttgataagaagaaagcaagtaccatacttaagagtaataagcatgtaatggattgtatgaaagaggagcttacagaacaattaagattaaagaattataaggatgttttagatattgtttctaaaattgctcatttttctgtttttaatcatactggcttgtattcttgtgaaaaatgtgagagagcattgctagaatgtgcaaataatttaccagaaatagaaaatacgaaattatttacaaaaaaagatttaaaaagaagaaaagtattacatgttttaagtgaaggatattcaacaggagggcatacaagactagttaaaaattggattgagattgacaaagattctgttcattcagttgtaactacatggcaatcagatacactgccagactggttattaaaagcaatagatgatagtggtggcgaagttatatctttggatttaatttcagatgattatttaaaaagagctgtagctttgaggaaaatagcttatgactgggctgatatagttattttatatgttcatatgtgggatacaatacctgttgttgcttttggagttgatgggaaaatacctattttacatgttaatcactatgatagtactttttggttagggacaagtattgcagatattgtcattgattttagcgaagctagtcaattaattacattagataaaagaggcatagataaatctgaaatattaccaatgccattaaaagaaaaagaagtattttcaaaatctgaagttagaaaacgatataatttggaggatgatgtgacaataatattgactattgctagtgaaagaaaatacaatagtgtaaatgatattaattactttaaaattgctaaaacattgattgaaaatacagataatacaattattattgttgtaggagttgatacagagaatctctattggaaaactttaagtaacgttacagataatagagttatatgttttggaacaacagcaaatatagacgatttttataagatttcggatatatacctagagtctttcatggtagggagtcatacttcaaaattagatgcaattttatatgatttaattcctgttaagtttaaaaatgaagtttcaccaatttttacaaatatgtggaattttatagataagtttgattataagaatataaaagaggttatagacatgataagaaggtacaatactagtgaatttgacagggataagataaaagaaaaacaatcagaaataaaacattttgttatagataaacactgtattgaaataaaaaactatatagacaaaatatataaagaggctaatcatcataaagttaagtatgatttatataaaaatgatgaaatcgaagactatcagctttttgttgcattatatggttatatggtaaaaaataaaaacatgtcataggtgataaaatgaacaatattcatatcaataaatttgaaaaaagctgtgaaaaaaactgggattattttgtagaaaataaatctataaatggtacatttctgcaaactagaaatttccttaattatcatgaagaaggaaaattcactgaccactcattaataatatataaaggtgaagaaatactagcagtcgtacctgcatgtgaaacttatgaaaatggtgaaagagtatttttttctcatttaggaagcacttttggaggtattataataagaagtggttttaatgatattaggcatgtaaatgctattacaaataagttagaaacatatttacaggaacaaagtttcaataaagtatatttaaaaaatacatcaagaatattttgtaaagaggatacttcattactagaatattttctatttaagaataattacatgttttatgatgaattaagtatgtttttagaattaagtaagtataaaaaagatatattagctaattttagatatagtaaaagaagatattttaaatattctttgaagaataatcttacctttaaaagattgtatagtgatgaggatatagtttgtttttttaatttactttctaattgtttagatagtaaaggagctaaagtaatacattcagtagaagaacttttggagtttaaaaataatagattaaaagatattgtagaattttatgcagtatatattgatgacattatgatttgtgggagcatggtatttaactttcaagaaagagtttatcatactcaatatctagcatcaaattcgacatataataaatattatccaatgatatttttatactataatctaataaaagatgctttagagagaaattttaagtatctttcttttggaattagcactctaaatagaggcaaatacttagacgagggtttagctacatttaaagaaggttttggttcaagtgcaatttgcaacagaacatactataaaaatataaataagtgataatcatgttttatagagtttttagagtatagtaaatatctagtactctaatattacataaaaataattagtttataaagaaggtttgtatatgaaaagattaatgattttaggctcaattaagtattttgagaatattgttatgtcagctaaaaaagagggaatatacacaattgtttgtgataatagaattgatactcctgcgaaaaagatttgtgatgaagcaatagatgttgatgtatttgattttgataaaataaaaagtatagctatagataaaaagatagatggaattttaactggatttacagattctttaatgaaaccatatgtttatattgcaaatgaactaaatttaccatgtgtgatttcttgcaatcaacttgaatctgtaactaataaggctattatgaaaaaatattttaaaaataatgcaatacctacaactgattattgtattattgaaagtctaaaagatttagaaaaaatacaaggattaaattttccacttgtaataaaacctgttgatggttatggttcaagaggtgtatattttgtatcaaatatagaagaattaatagaaaaatttgaatattctaaggaagcctcacaagatggacaagtaataattgaggaattttatgaaagtgaggaaatacaaggactagcttgggttcataatggagagtcacatgtattttatattggagatagagagcttgtaaatatacatacaggaagagctggaaaaccagatagattactttatccatcaaagtattgttttcaatatgaggaagaaataaaatctatatatcaaaatataacacaggcttttgatataaaaaatggacctctttatgtacaaatgttagtgggagcatatggaataaaggtatctgaagtaatgccaagattacctggaggttgtgactatatggctatttctcaaataacagatttagacataggaagtttatttgcaaactttagtgtgaataatgaagtaaattttgatgaaataaagaaatataatatgcatttatcaaaatgtgtatatgcattaccaatatacataagacctggaacaataaaaaagataaataatatagataaaatagaaaacttagattatgtcactcaatttctattattagtaaaagaaggagatacaataggattatatgaggatgagagacaggattgtggaagagtttatggaatagcaaataatatatttgatgcaaatataaagaagaaatgtattcatgaaatgatagaaatatttgatgaaaataatgaaaatatgatagaaaatttttaaataagggagtatgatagatatgaagctaataactcatgaacaaattatgtcattaaacatttctcagaaacaaggatatgaatggataaaagaatcttttttaacaaaaaaagattgtcaattaccaccaaaaataagcatggtagaagaaggtcatgtattttacaatgtaatgccgtccttaaatcataaccatatgattggtggaataaaaatggttacaagattgccagggagaaatccaagtttaaattcagatatatttctatacaatatgaaagatgctaaattaaaggctattttggatggtaattatattacagcttttagaactgctgctgttgctggtttggctattgatacttttgctaaaaaagattttaatactatttctattatgggtttaggtgtaactgcttctgctataatgaatatgctttcgtatactcttaaagataaaaatataaatataaagttacttaaatataaagaccaagcagagtcatttataaaaaagtatgaaaaaaatgaacaatttagttttgaaatatgtgatacacatgaagaacttattgtagattcagatgtagttatttctactgtgacatatacagatgaatatttatcagaatttaaatggtttaaaaaaggtgctttattattacctgtacatgttatgggatttggaaatgttgattatctatttgataaagtatatttagatgattataatcatttgaaacatctagaaaatatagatagatataaatattcttgtgaattttataatgttttaagtaaacaagctaaaggaagagaaaatgatgatgagagaataatatcttacaatataggtttgtcaatacatgatatattatttgcaaacaaaatttacgaattgtgtgaaacactaaattgtgaagagatagaattaaaagaaccaaaagaaaaatattggatatagtttatttcattcatatttacaataatttattgtaaatatgaatatgaagtaatatattgttagaaaattagcatgaataggatagataaatttatggataaatataatttaattaagttcttatctattggaaacgaatatataggaaatttagttgcattagaatcaaataaagcaataccttttgatataaagagagtttattacatatatgatgtaccaaacaatgtaaagagaggatttcatgcacacaaaaacttggaacaagtactagtttgcctaaatggaagtgtgaagataaaatgttatgatggtgtaaaagagagtatatttaatttacataaaaatgatgttggattgtatataggaacgggagtgtggcatgagatgtttgactttgatgaaaaaactgttttaatttctatagcatctgaacattacaatgaagaagattatattagagactataaagaatttttaaagtatttaaataatatgtagttattatacagttagtgatgtattttcttaattaaataaatttaagatagccatatagagaataaatagattaggatgtgaatttattgttggttaaatttaataatttattaaaacagttccaaactcataaagaagaatatgaacagaagattaaggatgtaatggaaagtggatattatatccttggaaatgaagtaaggcattttgaagaagaatttgctagctatgtaggtagcaaatattgtgttggtttagccagtggtttagatgcacttataattgcttttagagcattaggaataagtgaaggtgatgaagtaatcgtgcaatcaaatacatatattgctagtgttatgggaatcagcataaatggagcaacaccagtatttgtagaaccaaatgaatattataatatagattcatctaagatagaagaaaagataaatagcaaaacaaaagctatattagtagttcatttatatggtcaagcaagtaaaatgaaagatatacaagaattatgtgataagtataacttgtatttaattgaagattgtgctcaatctcatggagctaaatatgatggaaaaatgacaggaacatttggtgatataggttgttttagtttttatccaagtaaaaatttgggtgcatttggagatgcaggagctatagtaactagtaatgaggaaatagctgataaagtgaaaattcttagaaactatggttcagaaaagcgatattataataaatttgtcggatataattcaagattggacgaaattcaggcaggtttattaagagtaaaacttaaatatctaaatgaaattgaaattgaaaaatcaaaaatcgtagatagatatcttaatgaaattaataatcccaaagtcatacttccaaagatagaaaataattgtactcatgtatggcacttatttgttttacaagttgaaaaacgagatacatttatggaatacttaaagaaaaatggtatagagtctataatacattatccgataccaccacatctatctgaagcatatgcttatttgggatataaaaaggggagttttaatatagctgagaactattcagataaagttgttagtatacctttatttgtcggtatggaagatgaagaagttagttatataattaaaattataaatgaatattaaactaatcataataatatcaaaaataaattttctatatatcatttatttaaatttcgttaattgacatttttaaatattgatatattgtacaaataaaattgaaatatatggaagaatatagaataaagatgagatttgtctaatatttttataaattaaaaatattttcaaagagtttattataaaattgtagactatagtgtttataatctttgtaattattggtaactaaatttaaaaaataaaatatttaattatacacaaaaaagatatttaaaaaatttgttatttattgtatacttaagttaaaactaaataggcaaatctagagaaatctagtgacgcaaagctataggggctaaggtttgtatacacaaactatgtcagccagttgccaaaaagagttctaggtatattgtatacgtaggaagagtctaggatgactgcctttttggtggtcattttgttatggaaaaaatcacattatgtagtaaaaaacacctataataacatattataccaaatataatttaaaataaagataaattatctataaaagttactattttacaaaaaaaggcaactttataaagaaatatttaaatttatattaaaatatttttatatttttattaggatttacgaaaataatattagttttcttaccaaagtgatacattattatattaatgtaatagaaatgtaattaatttggatgaataaagaagtcattttttgtaatatagcaacttcattttttattaataagcaaaataaataaaatatattttgaggaggagtgagtgtgaatacatatgacattataaaaatgggattagatgcaactaatttaagaagtcagacaatagcaaataatatagccaatataaatactgaaggatataagagacattatgtaacttttgaagaaacattaaatgatgctatgccaaaaatagaagaaaaaacagacaattctaaaggattaagagtggatggcaataatgtagatatagaagaagaaaaagtaaatcaagcaatggcaacattacaatataatgctttgataagttttgcaaatggaaaaatagcaatgactaaatcaataataagtgggaggtaattaaaaggtgagtgtgttcagtggaatgagaatatctgctagtggattaacagcagaaagcttgaaaatggatatcatatcgtccaatgtagctaatataaatgccacaagaggtccaaatggagaagcatataggagaaaagttgtttcatttgaagaaaactatgataataaattaggtatgctaggagtaaaagttacatctgttgaagatgataaatcacctcttaaagaagtatatgacccatctcatccagatgcaaagccaaatggatatgtagaatatccaaatgtaaatatattggtagaaatgacagatttaataacagcttcacgagcatatgattctaacgtagatacattgaatgctcagaagtctatgatatcaaaagctttggaaataggaaagtagggataaattatgccaattacacaaattaacaatttaatgcaaggtgcaaagttagataatttgattggagaaacaaaaccattaactcttaataataaagaagaaaaaaagaactttgaagatgtaataatagatactatagataaagttaattttcaacaagtgacagcagatgatatgaaagaaaaatttataaaaggcgaagatgtttctatgcatgaagttatgttaataggtcaagaagcacagctatctatgcaatatttaatagaagttagaaataagattcatgatgcatatcaagaaatgaataaggtacaaatttagccttttgaacaggagtaataatcaatgatagccagttttaaaaataagattaaagagcaagttgctaaatctaggacaaagataagttctctaaaaaagggaactaaaatagcattaggtataggggttattgctatatgtttagcgctagtatttacagcaatatctgcgagcaaaaataagtatgcagtcttattttcagaactagatgttcaagatgctgcagatatatcagcagaattagagtctaaaaagatagatactaaggtaaagggaagtacgatttatgtacctagaacagaagttgataagttaaggctggagctagcaccaagtcttacaggtggttctaaaggatttgcactaatggatgatagttcatcaataggacttactgatgaagagtttcagattaagaagcaaagaatgatacaaggtgaaatagaaaaaacaataaagagttttccacaagtggaagatactagagtacatataacatttggagagtcatcagtatttgagaaggaggctattccagggagtgcagcagtttatttgatgttaaaaccagggacgactttggaaaaaaaccaaataaaatctgttatggcacttatatcaggaagtgttacaaatataccagagaaaaatgttcaagtcattgataacaaaatgaatttattatctgaaggtattttagaggatgaagatgttgatgaaaataatcaaccaacaaatagtttgattaatgttgataaaaataaggcatctgaacaagcattgaataaacaattagaaaagtctattttagaaatgctagaaccaatatttggtaaaggaaaagtaaaagccacagtaaatgctgatttaagttttgatacagctgaaaaaactgagataaaaattgaccctgataaagttgcaataaaggagacaaggtcgaaaaattcatctaaatctgctacaaataatgttcaaggtgtagatgctaacatgaataaccaaggaaataacaatggtactaatacagaagatagtttagatgagagttttgagtatgaaacaggtaagattgaaactcacactatagttgcgcctggagaacttaatagattgacagcttctgttgcaatagatggaaaaatagctaaaggtgtacaagctgatgtagaggatattgttaataatgctataggtatggatggagcgaggggagatactcttagcgttgtttcaatggtatttgacccagaagggaaggcagaagctaaacaagagctagaagagattaaaaaagaaggatttaaaaagaacataataaaagcagttattggagtagtggcagtggtagcaattggagctattggatacttaatatataagaaaagaagtgaacgagaagatatggattatgaagatgaagattatatttctaaatctgattctgttgataggaaggataatcctctattaggagatgacccagaactgacattagaggaagctgttaaaatgtatgcagaagaaaagccagaccaagtaacagagataataaaaacttggttaaatgagtaagggggatagaaagtgtccacggaaattacaaatgttaatgcgtttgacttaagtgatataaatgaaagtgataagaaagagaagatagaaggtgagggtttaaaaaaagctgctgtattattaatgacattaggaccaaatgtgtctagtgatataataaaaagcttgcctgataaacaagttcaaaaaataggtttagaaattgcaaatatttcttcaatagcttcaaaagaaagaagagaaatcttaaaagagtttgtagagataaatagggcaaaagattatgttatagaaggtgggcttgaatatgcaagagagttgttaagcaatgctttaggaaatgctaaagcaaacaaattacttgaaggtatatcaataaatacaagtacaaagccttttaaacatattataaaactagatgtaaagaaaatattagaaatacttagggatgaaagtgcacaaactatagctgttttacttgcacatatggagccagaaaatggagcagaagttttatcatacttagattttgatttacaaaatgaagtagctatgagaataagctcaatgggttcaatatctccagaagtaataaaggtaattgaaagttcattagaagataaattacactcaataagtggtgatgattttaaggattatggaggagtgtctaccttagttcaaatattgattaattctgatagaaaaacagaaaagaatattttgggaactattgaagaacaagacccggctttagcagctcaaattaaatctcatatatttgtctttgaagatattgtcaagttagatgatataagtatacaaaaagtattaaaagaagtgactatgaaagatttagtatatgccttaaagggtgtggatgatgagatttcagatgctatatatagaaatcaatcttctagagcagcagatgcacttaaagaagaaatggaaatggttggtgtcataaaagttacacaggttgaggctgctcaacaaaagatagcaaatatagtaagaaaacttgaaagagaaggtgccataactattgtaaggaattttggtggtgactttgttgaataataagattattaaaagtaaaaaagcatcatataaaggagtgctagatttaaccataatagataaagttagagtgggagaatcaaatgtaaataaagaaaatgattgtagatttagagatgaggtaataaaagaagctatagaatctgctgagataaaaaagaatgagatattagaagaagcaaaaatgaatgcacaaaatatagaaaaacaagcatatgaaaaagggtatagtcaaggtcaaaaaaatggatatgaagatggatataaagagtcatatgatgaatatacccaaaaagctaaagatgaagcagattttataaaaaatcaggcagacttaatactattacaagctaatgagaagatgactgagtacataaaagaaaaaaataaagagattgtaagacttgctattaatatggctagttctgttctaaaaaagcatttcgaagatgaagaatctatgagtgatttgttaaagcaaattattcaagattatgaaggaagtagttcatttatagtaagatgtaattctttctataaagataatatagagaaagagtttgaattattcaaagaggaaacatcactaaaatcaagtgtatttgttattgcagatgatagtatagataaaggcaatgctatcatccaaaaggaaaatggaagaataatagttggtatcgattgtgctatggaaaaactaaaagaagaattgcttggtgaataaagtatgtataaaactgatatatctatagattttgacaaaataaataagaaaatagaaaatttagaactcactatatcagaaggtagagtaaagaagataataggacttactgtagaagttgaaggaataaaagcttttgttggggagttatgtgttatatacaatcaagtcaataaaccagtgaattgtgaagtagtgggttttaaagataaagaagtcatattaatggcgttgggagagctaacattgatagctcctggttgtaaagttatttctaagggaatacctttaagtgttatgtgtagcgataatttactaggtaaagtacttgatggtcttggaaatcctatagacaactcagatgctgttttaggagatagatacaacttgaacaatgaacctcctgacccaatgaagagaaaaaagatacgaaatataatggaaacaggtgtaagagcaatagatgcatttactacttgtggtgaaggacagagaatagggatatttgcaggaagtggagtaggtaagagtacgactctaggtatgattgctaggaatgcaaaagcagatgtaaatgtaattgcccttattggagaaagaggaagagaggtactagattttattgataaagatttaggtgaagagggaatgaaaaaatctgttgttgtatgtgcaacatcagataaagctcctttggttaggctaaaaggtgctcttactgctactgcaatagcagagtattttagagaccagggaaaaaaagtaatacttatgatggattcagtaactagatttgctatggcacaaagagaagttggtatagcaataggagaaccaccagctcaaaaaggatatacaccatctgtatttgctattttaccaaaacttatggagagaacagggacatcagataaaggttctataactgcattttatacagtattagttgatggagatgactttaatgagccaatagcagatacaacaagagggatacttgatggtcatatagttttatctagagacttggcaaataagaatcattatccttctatagatgtattgaacagtttaagcagacttatgaatgagattgcttcaaaagaagacataaaaatagcatcttttgcgagagatatgcttgctgagtatagagaagcagaagatttgataaatataggtgcatatgcttcaggtacaaacaaaaaaatagatgaagcaatctactatcatgagcatattattaattttttaaaacaaggaataaatgaaaagagttcttttaatgaaactataagtagtttaagaagaatctttgaataaacaatttaaaaaaatatttgaataggttgtgatggaattggataaaaattttaagtttagattacagaaagttttagacttaaaaataaaagatgaagaagagataaaaatggaatttgctaagattcaacaaaaaaaaatagatatagagagcaatttagaaaacttagaaagtaattacagcaaatattctataagtaaaaataatgatagtgttcaaaatcaaaaaataactattaactatttgttagctttaaacaactctataatggatttatcagaagagctggataagtcgacaaatgaacttgaaaaagctagaaagcagcttataagcaaacagatagagagaaagtcattagaaaaattaaaagaaaaaaaatatggacagtattataaagaagaacagttaaaagaacaaagcactaatgatgagtttgcaagcatgagttatttgagaaatagacaagttctataaaatagtaggaagtgaggatattattgtatgaagatacaagcagattcttataatattattaaagatattgggaatagaaaaagctcatctaagaataaaaatataaaaaataataaatttgaagataatctatataaggcaacagaccataaaaaggttaaagatagaagagaaacaagtaagcaaaatgttagttcagataaacgggaaaatagtgataatgagtgtcatttagatgaagataaaagtaatcacttagaagatgaaaatacatatgaaaaagattgtagtaataataatgaagctttacatcaattactgaatcttttaaaagataattacaaaaaagataaagatataaacactatattgaataatctaaaaaaactaagtatatcagatgaattaaaacaagaacttaagcttaataaaaatatattaaataagattgcaaatcaaaatttagagttaaatagagctagtacaaataaccctaatgatatagaaaatttagacataatgaagttaagagaacttttagaaaataatgctagtgaagatattgaagtaattagtaaaactacagaaaatgatactaaaagcatagacttgtacagttttgacagcaatagaatagatactcttaactcaaataaacagaaagatgatagttctgatattttggaaaaactagcaggggtaaatggaaataagagtggaaattttggacaagtaataaataaaagcgttgatatgaataaaattaaaaatgataatgttaatttaaaacagatagaatcaaatgtaatggatgattctataaaagctattaagcatatgaaaacaaatgatatacaagaattgacaattaaattaagaccaaaagaattaggagatatgaacatacaattgttaaaagatggtgaaagtatgagagctgttgtgactgttttcaacaaagatgtctttgactctataaataaaaacatagcagatttaaagcaacatcttgaacttacaaatgtaaatataaaagatgtatcagtgcaaatgcatagcgataatacaaatacatctgatacctttgataaagcatttgaacaacagaatagacaaaataaccaagaaaacatgagtaagcaaaatacaaatgataagcgtaacaatgtagtcatagaagatgagattaaagaaaatattattgatgatgatagagtagatttactagcttagtaagggggaagtattgcatgtacggaatagcaacggctttggcaggaactcaggtaaactataggtcaaataatttaagccaacttgaaagaaatattaatgatattgccaataaacaagttagaagtaaaggaaatcagacagtaacagacaatgggactccaattataggacaaggcgatgatgctgataaagatttgtttatgaagattcttgtagcacagatgggtaatcaagacccaatgaatccacaagacccaacagaatatgtatcacaattagcacagtttgcaactttagaaaagatgtcagctatgaatgataagctagatatacttttagccttaagcaattccactctaataaattctgctttgagtatggcaacatcattaattggtaaagaagtagaagtatctggggaagaggaagaagatgaaaacattgtaggagtagtaaaatccacatatataaaagatggggaagtacacttagaattagaagtagatggaagtgacaaaactgtaggtgttaaatatgaaaaattacttaaaataggagaggtagatgcaaattcaggagaagaaaatgactcttcagaacaagaatctccagaagaagtataatattaaatgagaaaagaggtaaatttatgataaaagcaatgtattcaggtgtaagtggaatgaaagcaaatcaaacaaaactagatgtaataggtaacaatgtagccaacgctggaactacttcttttaagaaaagttcagctagaataacagattcattttatcaaactgtactatatgcaagtgctccaacagcggcattagggggaacaaacttaggacaagtaggtgtaggtagtaagatatcaagtataaataaagatatgacacaaggaaatgtacaaccaactaataggccatctgatttaatgatagatggagatggatatcttccagtagtaagacaaggaacagttatgtatacgagagatggttcttttaatttagatacaggatttaaagcagctgatggtgctttgaagaatattaaaggtggaagacttgtaaatggtgatggatatatgttacaaggtgtgatttatgatggggaatataaagctgatactggagaattcattaaaaagggtgatgctaaaggaaaagagcctattgtaataccacttcaaagtataagtcctaaggatggaacagttcaaaatgtactagagtataatatatcaaaggatggaacagtagaatttttattgagtgatggtcaaagaactcaatttgtctatgatatacctgatggtgctaaggtaggagatacacctgctggaatagataaattaaaaggtacaatacaaaaagtgcaaacatatgcattccaaaatccagcaggactagatgcagaaggaggaaacttattcaagccatcagcaaactcaggagatccacaaatagcaggagctacaggaaacataatacaaggggcaatagaagcttccaatgtagatatagcagaagaatttacagaaatgataatagcaagtaggtctttccaagcaaacagtaaaataatatcgacatcagacgaaatacttcaagaaataataaatcttaagagatagtaggtacatattatgataagagtaacggatttaaacggaagaagatacatattaaattcagaccttatagtgagaattgactctgtaccagaaagtaggattctccttacaacaggagaaaaaaatcttgtaaaagagtcagtagatgagatagtagataaagtaataaagtataaaagaaaagtaaatgtaggttatattaggagtgaaaaataatgaaaaaaacagattcactaacattcattggactaatattatctacagtattagttttatttggggcagtaaaaggaagtagttcaggattgaaaagttttttcgattttgcatctatattaatcacagtatttgggtcatttggagctttgatgattacatttactattgatgatataaaacttataaaagatgcgctacaatactcattcaagacaatgaatatatcgaaattagacttattaaatcaatttaaaacactttctaaaaaagcaagaagagaaggacttttatctatagaaagtgatgtaatgaaaatacaagacccatttatgaaaaaagggttagagttatgtattgatggccttgaagtaaatgaaataaggtctatactagaactcgaaatagattctgttgaagaaaccaataacagatattctaaactatttaaaacttgggggactttcgcacctgcatttggtatgttgggaactctaataggtttaatacaaatgttatctgaccttacatctccagatttaatagcatcgggtatgggaaaagcattaattacgacattttatggttctttacttgctaatatcgctttgaacccaattgcatataatatagatgagaagactgaaaaagagatttatgtaaaggaaatgatgctggaaggtataataagcatacaatctggggagagcagcatagtagttgaggaacgtttagctacatacctttcaaacaatgagaagctagaaattatgaaatccaataaaaatacagaaagagcaatgagtaatggcgcgtaaaaaaaataagaaaaaggatgagataaatccagatgcatggttggctacttatgcagatactataacactgattcttacattttttgtgttattgtatgctacatcagttgtagatatggaaaaatttaaaaacatagcagatgcgttaaaaggtcagttttctgggataagtatgttcagtacaggttcaagtacaagtgagaagtctccaatagagagtgttttagtggataaaaatgataagtcaaatttagaacaggatttaaaagataaagttaataattctaacttacaaaatagtgtaacagtcaaagatgatagtagagggattttactagaactagatgattcaattttatttgactctgggatttctgaattaaaagcagatagtaaagccactcttaataaagtatatgacatgataaagatgatgaaaaataagatagttatagaaggccatactgataatgtacctgtaaaatcaagtacacatgaatccaattgggatttatcttctagtagagcagtaagtgttgtaagatactttgtagaagaaaagggcatggaccctagactattttcggcaacaggatgtggagagtatcaacctttggtttcaaatgaaacagcaaagggaagggctgagaatagaagagttaatatacttataactattgactaggaggaagaggtttgttcaaaaataaaaaaattattataattattttgatactgattattttctcagcaggagcaggtttttttatattaggagaaggtggaaataaacaaattgacaagattgcaggtttgtttattccaacagggaaaggcaaagatgaagtaaagaccgaaaatcttgacttagaagagatggtattaaagctagctgatgaaggtgtaagatatttaaaagtatcaataactgtatcttatgattcttcatataaagatatagaaaaaaatacgcctttaattagggataatattataaattgttttatggcaaaaagggcagatgattttactgctgataatttaaagaacataaaagaagaaattaaaaatacattaaatatacaactaggtgaaaatgtaattcaaaatatatatttcacaaatatagtagtgcaataaaaggatggtaagacatgatactttatttactaaaaatattaatatgtatcccaataattttaatattgatagtcttatctttaaaaattagccaaggaactttattaaaaaaatataatgataaatatataaaaatactagatattgtaaatataagtaaaaacaatagcataataattttaaaaataggtgaagaaggatgcattatggcatcttcttcctctagcatgaataaaataaaagatttgaccaaagaagaaatattaagaatagaaaacgacattaaagaaagaaattttaaaattcaagattttaaaatggaaagaattaaaaagaaatatgatttcagtagatatattggaaaatttacaaaaaaggaagataagtaaatggaactattatcaaaattacctttggctgatgtaccatatacaagttcaatgcaattgtttttatttctaactgcattaatgtttttaccatttgtaatgtttatgatgacaagctttgtcagaatagttataagtttatcatttttgaaatcagcattaggagcacagcaagcaattccaagccaaattttggtagggcttgcaatagtattgacaatatttataatgagaccagtattaaatgagataaacgaaaaggcattacaaccatatatgaaagaagaagttactatggaagaagctatgaaggaagcagagggacctattaaagaatttttattaaagcaaaccagacagacagatttagatttatttgtagaacaggctggtttgaaagaaaagaaattaactcgtgaaaatataccactatctgttgtagttccagcatttgctataagtgaactaaaaactgcttttcaaataggttttttaatatatataccatttttgataatagaccttgttgtggcaagtgttttgatgtctatgggtatgtttatgttgcctccagtcatgatatcattaccgtttaagttattattatttgtaatggtggatggatggaacttgatagtaaaaacattgatattgggatttggataggagaaaaatagtatgagtgaatttatgataatgagtgttcttaaaaatggcatgtttacaggagctatgattgcagctccagtactcattgtttctcttgtagttgggcttttaataagtgtgtttcaagctacaactcaaatccaagagcaaactttgacttttgtaccaaaactaatagcaattcttttagtagtagctattggtggaagctggatgttacatactcttattagctttacttcggagatattcaatatgatgtctcttataactaaataagtaggatatatatgatttttgtatttattagaatagtggcattctttggaacactaaggatactatttccagctggtacacctgctttatttaagtcgctctttgcaatcattatatcaatattgatttcaagtactatgcaaattgaatatgcaacaaatatagacaacattgtattgtttaccttatatggtataaatgagaccataactggcattatgcttggatatataaccaatctatgtttttatagtatcagaatggcaggttctatgatggatcaacagatgggattatcaatgattaatatgtttgacccaaattcaatgactcagacaactttaattgataatcttatgaactggacagcacgtatgatattttttagcatggatggtcatcatgttttaattagaggcataaggtatagttttgagttaattccaatagggaaatcattcgtagataataatatagattatataataaacatatttgtgcagtgctttttaactggattcaaaatagcaatacctattgtactttgtctgcttatggcagattttatattagggcttatatcaagaagtgtacctcaactaaatgtaatgataattggtatgccattaaaaatactggttggtattgcgttatttatcatatcaatacctttaattgtcaatcaaataagtcatttattaagtcaaataccaaagatgtatgagggaactttcgcactagctcctatgttttttatgggttcaacagataaaacagaagaggctactccaaagaaaaagggagaacaaagaaaaaaaggtaatatagcaaagagtaaagaattacccgttgcaatgactctacttgcattcactttattagtacctacattattttcatatgtagtggatacacttaaatcttctcttaattattttttgagtctagatttttatatgaatataaattattcaagtatagagaaattagttatagcaggattaatggatttttttaagatatttttaccaatagctattccattcttagttttaggtatagtcgcaaacctatttcaagtgggaatactgtttactggtgaaactttaaaacccaatttatcaaaattaaatccagttagtggatttaaaaacatgttttctatgagaagtttgtcaaccttaataaaggatacagcgattatatctattttggcttacataggatatacattcttccaagataattatttagatatattaaagctaggtaacatatacctgccaactttaatgtacacagttaaagatttagtatattcaatattaagtaagatttgtgtagctatgatagttatagcagttgcagattatgtttatcaaagatacagtcataaaaagcaacttagaatgacaaaacaagaagttaaagatgaatataaaaactcagaaggagacccagaaataaaagctaagataaaacaaaaacaaagacaaatttcgtctcaaagaaccatgcaagcagtaccaagtgctactgtaatagtaaccaatcccacccacttatctatagcagtgagatatgaaaaagggaaagaccaagctccagtagtggtggcaaaaggtgcagattatttagcttttaaaataagggaaattgcaaagggaaatgacatacctataatagaaaataaacctattgctaggttgttatataagcaagtagaaatagaccaagaaattccagaggacatgtatcaagcttttgcagagatattagtagcagtatataaaatcaaaaatagatacaaagtcctcaaaaggtaggataagtaatgaataagtttaatttaaaggaaaatatggacgtaatagtggcatttggtgttgtagggattgttcttatgatgatagtgccgttacctacatttatattagatattttactggcaattaacataagtttatctgtgctaattttactaatgacattatttacaacaaatgtacttgatttatctatatttccaacagtgttacttgtgacaacactatttagattgggattaaatctttcatcaactagattgattttaacacagggatatgcaggtgaagttatagaggcatttggaagttttgttgtaggtggaaattacgtagtaggaataattatattcttaattatattaattgttcaatttgttgttataaccaatggttctggaagagtatctgaagtaacagctagatttacgttagatgccatgccaggtaagcagatgagtatagatgcagatttaaatgcaggagttatagatgacaaaactgctagaaaaagaagaaaagagcttcaacaagaagcagatttttatggctctatggatggagcaaataagtttgtaaagggagatgccatagcaggtcttatagtaacagcaataaacataataggtggaattgtaataggagctgtaatgctgaatatgactcttatgggtgcagcacagacatatgtaagacttactataggggatggtcttgtaagccagatacctgctctattaatatctacatcagcgggtataatcgtaacaagagcttctactgatgaaaactttggtggattagtaagtaaacagttaacggcaataccaaaagcagtaatgatgactggttgtgttctaatcgtacttggtatgatgcctggattacctaaaccagcatttttttcactaggtataggtgctatagcagcaggttactttttaggaagagaaaagaaagatactttagaagacttggagtttgaaaaacctgatatggtaaatccagataaaaatgaagtagaagatgtaacaaacttaataaatgtagaatcaatagaagtagaaattggatatggtttaatatctttagctgatgaatcagcaggaggagatttacttcagagaatagcatcaataagaagacaatgtgcaatagacatgggtatagtcgtgcaacccataagaataagagataatttacagttaaatccaaaccaatacaatataaaaataaagggaaatgtagttggtgggtatgagataatgcctaatatggttttatgtatggaccctatgaatcaaggatttagtatatttggaataaagacaattgagcctacttttggaatagaggcactttggatagaaagtgacaaggtagaagatgcagagataaagggttatacagttgtagattcatccacaatacttataactcacttactagatataataaaatcaaatgcacacgaattactgggaagacaagaagttaagactattatagatgcagcaagagaaaattatagtgctgtagtagatgaattgataccagatttaatgacacttggtgaaattcaaaaagtacttaaaaatctgttaagagaaaaagtaaatataaaggatagggttacaatacttgaaacgcttgcagaccagtctagaaatacaaaagatatagagcttcttactgaatatgtaagaatagccttggctagaagtatttgtaataatttagttgatgatgataagacaattgtagtggctacattgtctccagaaactgaagagttggtatctaataatttacaaaggtctgtaaatggaacttatccagcagttgacccagaaaatacaaataaaatatttgagagtatacaagaagtaatgaacaatgtatatttcaatcataatataccagtaatagtagtatcaccaaagataagagctccatttagaaaattagttgaaattgtatatcctaatttgactgtattatcattaaatgaaatacctaacgatattaaaatcaaagcagaaggtgtggtgagcatatatgatgacgaaaaagtatacagctaacacaattcaggatgctatgaatctagccaaaatggaattgggtgacaatattacattaatagataaaaaagaagtaagaaagtctggaatacaaggtatcttttcaaagaaagatattgaactaactattggatgggaaaagagagaaaacgtagaacaaaaagatttaaaacgagagatagaacaattaaagttaattattaacaatatggggtttgataataagaatgataatgatatagataaaatatgtaaaaatctactaagtttagaattaaatgaagaaattgtagaatctataagaattgatttgcaagaaatgaagttcaatggaattgatacaagcaaaaatttagtagaaattttaaagaaaaagattaaaatagaaaatcaagcaataaatggtaaaattgctctagtcggaccaccaggagtaggtaaaacgactacaatagcaaagttagccgcaaaattagtttttgaagaaaataaaaaagtaggagtaataactatagatacatacaggattggtgctgtagaacagttgaagatatatactgatataatgaatattccttttaaaggggtaataagtcccgatgaaatggaattggcacttgatgagatgaaagattgtgatgttgtattaatagatacaacaggtagaggctataaaaactctatgcaaatactagaaatcaaaaatcttatagataaagctgaaactgataatatacatttagttgtgaattgtacaacaagagaaagtgatacaaaagcaattatagattcatatagaaatgtgaattttaaaagcttaataattacaaagctagatgaaacaataacatatggctcaatatttaacataatgaattatgcacaaaaaccaatatcatatattacaacaggacaaaatgttcctgatgatattataaaacctaatgaagataagattataaggttactattaggagttgaaagtatatgatagaccaagctcaaattttgagaaaaatggcaatggaaaaaagaggacttgatgagtttatagtagagaatgagaatgtacctaagataattacaatagcttctggtaaaggcggtgttggaaagagtaatctcgctacaaatttgtctatatgcttgaccaaacttaataaaaaagttcttatattagatgcagacataggaatgtctaatatagatataataatgggggtaaatgtaaaagggactataattgatgtaattaatggcgaaaaaaatatagaagatataatttcacagactaagtatggtgtaaatataatatctggaggttctgcccttaatcatatagaagactttacagaagctcaaagaaataagtttatacatagcatagaacagattcacgatgtggattttataataattgatacaggagctggtatgagcaaaagcctattgtcatttatatactgtagtactgaatttttcttaataacaactccagaaccgacatcattgactgacgcatatagtttattaaaagctataagtaattttggcataaagagaagtgcaaatataataatcaatagggtaattgatttagaagaagcaaaatctacatacaaaagaataaaaatggttgtggacaaatttctaaaccttaatctagaattgtatggatatataatagatgacaaaaaagtaagtttatgtgtaaaaaaacagataccattcattttagaatatcctacaagtattgcatcaaaatgtattatagccatagcaaagagaatggtaagtcagtcaagagaagatattgttgataataaaagttttctaagaaagatgtttagtatatttaaaagctaaggaggcgtagttaatgaatagagaagaattaataaaagagaatatgcctcttgtaaagagtatagcaagaaaattttttataccagggaaaggttttgaatatcaagacttagtaaatagtggagtcattggattgattgatgcaataaataaatttgatgctgaaaagggggcaaagttttctagttactcttatataaaaataaaatctgctatattagatgaaattagaaatcaaagtccaatttctaaacataatctaactaaagtaaataagtataatagagtggtagaaaagttgcaatctaaattattaagagagccaacttcatatgaaattgcaaaagaattaaatgtttcagaaaaagaacttcatgatatcgaaagtaatatagacatgttaaatattgtatcattaaactatgtaatctttgaagatacaaatgaaactgtacaagatgtaataagtgatagagaagaggaagctccagaaaatataatagaagaagaagaaaagttagagattctatctaaagcaattagtaatttaaatgaaagagaaaaattaatactttcactgtactattatgaagatttaaatctaaaggagatagggaaagtgctaggtgtttcagaatcaagagtttcacaactccacagaaaatcaataagaaacttaagaaacaagataaaagaacttaaatattctatatagatggtgattgataagatgatacaaattatattaatagtagtgtctattttaataatagtaactatagttataaatttacataaggaatcaaaaaataaagataacagatactttgataaaatatttgagcaagaatatgaagcaaatgatagattaataattgcagaaaaaagaagattctttttagacaaagtacttgctgaaataagaagtaataatcatataaaagtttatgaaaattataacctaataaaggctaatgaagaaagaaaggaaaacatatttatagaatcaaaaaaggaagtaagacaagaaaatgagttatctcttaaagtgaaacatcttataagttcaggttatgatgatgtggaaatatgtaagatgctagatattggaaagggggaactgtcattaataaggagttgttacaaaatataaggatattattatgtgataaaaaagtattcttaggaataggtattggtatattaatatcaactttatgcataatgctttttagtaataatgatatgagtaaggcagagatagaaaaaaaggccagagcgttaggcatgaaatatacaagtgagatgaaagttttagaatagatgatactgtttagacatttacaaaaaaggaggtcataatgtgataagaggattatatacagcagtttctgctatgataactaatcaacaaaagcaaaatgttgttgtcaataacctagctaatatggatacaaatggatataaaagtaaacaacttttgactaaaagttttgatgaattaaagttggagggttacaataactacgcaaatggaactaaacaaaagcagattataggcgatataagtccaggtatttctatggatgaaactatcacaaattttaatcaaggacctataaaaactactgataataaaatggatgtagctattcaaggtaagggattttttctagttagtgatgcagctggaaatcaattttacactagaaatgggaacttcagaacagacaatcaaggtgaccttataacaagtgaagggtattatgtacttgggacgaatactgctactggtgctgtaggtcatataaatgtaggaaatcaaaaatttgaagtggcaaaagataatacaatatcactagatggaaatgctatgtataaattcaatattgtagattttaatgactacaataacttaaaaaaagaaggagataacttgtattctggaggaggagctatgaaagtaaataatgcacttacaatacaaagtgcgatagagtcttctaatgtagatatggtatctgaaattaataatatgatgaccatatcaagagaatatgaggcaaatcaaaagataattcaggctatggattctaaattagcaaaaatagcaagtgagattggttcagtaagataggtgataggaggtgaatttttatgtacacaatgttttatactagtaaaacagctttatcagcaaatcaaagtaaactagatataatatctaacaatatagcaaattctgattcaacaggatataaaaaaataaatatggaatattctgatttagtggatgaagtactaaatagaccatcatatcctacaaatggcaatgatatatcgactggaacaggagctaaggcaacagctcccatgagaatttatgaacaaggtgcattggcccctacagatagtaagagtaatttggcgatagatggagaaggattctttagagtgataagaaaagatggtacatatgcatatacaagaaatggtggatttaatatagatggtttaggtaagattgtagatgataatggaaatatattagatgttcaatttgatgcaggatataactataataatacgaatatagatagcacaaacttaacagtttcaagaaatggcgagttattcgtagataataaaaaaataggaaaaatcaatttatatcaacctataggaactcaaaattttatatctgaaggagatagtttattcgtcgcaactgatgcagcacagattaaacaagttgagaaagtagatatagttcaaggctatagagagaggtcaaatgtttctttacaagaagaatttgttgacttaatagccactcaaagagcatttcaaatgaactcaaagggaataaagacagcagatgaaatgtggcaaatagctaataatttaagagctaaataattatgtaaggtgaggaatattcatgaatgatatgaaagagtacgattttggcaaacctcagagttattcaagagaaaatttaacttgtttaaattttttattagctgaattttgtaaaaaatataaaaactatataatttatgaacttaagtgtaattctagtatgattgttgatagtatagaccaagtaaattatcagacttttttagatagagtaacttcttcatgtgtagtagtacaaaatgcaatggaacctgttatgaaaaacttttcttttagaatagatagaagtgtagctgatatgtggattgatataacttctggaggaactggagttataaaggataatgatagagagcttacagaacttgataaaaaagtgcttttacatcttatggatgatttagtaagaaatatgcacttatttgaaggttttgaaaatatacaagtattggatacacatacacatattaatttaccacaattatgttctccaactgcaccagtatgcgttgtagatttaaaagtgctaaatgataatgagtatattggaagtgtttctctttgttttccgtataatggtttagaggctctattagaaagtatatctgttatagaattttttgataatgatgtaggagatgattcagaggaatttaccaaaaaaatctataatagtgtatctaatatagaattatcagttattgcagagataggaaaagtatcaattaatgttgaagacttacttaaactagaagttggagatgtaatagtaacaaataaaaaaataaatgattatatagatatatttgtagaaaattcaaaatcatatacagcaacaccaggatttatatcaagcaaaaaaggtgtaaaaataaatgatgctgttggaaaagaggtgtagttatggacaatagtaatcttatttcagatgaagaagcaaagatgttattaaatgataaagttgaaagtgaagttgatggggatgatgagttagccttagatgtctctgaagttaatcgaaataatatacaaaggatacttgaccttaagttagaattatctgtagttatagggagaactaagatgactctaagagatattttaaatttacataaaggttctcttattgaactgaatactttagcagaccaagatgtggaaatactaatagataataaggttttggcttatggaaaagtagtggtggtagatttaaattttggtgtaaagataacaagtatagtaagtgaagaagacatggtaaaatctcttgtttagagataacatcaattaatacttaaggcatgaggtggtacttattttaaacttaaatgatataaaaaaagatatactaaaactcaataaaaaagactcatgttctctatataatgaatctattaataatataaataataattgtatatcaactggattaaaatttttaaaacaagcaagagatttaaacccagatgatgttgatatattaaatctcacaggtcttgtaaacttactaaaatgtaattttgatgatgctgtagaaagtttctataagagttcactttgtgaaaaaactgctctgtgtgaaaagtatataaacatgcttacatctgaggagtttttaattttctttgaaaagtacaatcaacttataaggttaataaataaaggaatgtataaagaagctatacaagggtttaaacttataactgaccaatactgtgatttaatagaaccttatgagttgcttgccttactgtatgacaaggaagaagaatatataaaatttgatgaatgtttagaagtattgaagattattgataaggaaaattatttattaaatcaagaaaataacacattagatatgtataatagtgctaatatacaaactaaaagtaatgtaaaagtagatgattataagaatgagtttttacataaaagtagtagtaaccataaaattaatgattataataatgtaactaaagaaaaaagttcaagcaaaaaccagaaaagttcagattctaataagaaaaaaagtattaaaaaaaataagtacctatatatagccataatattaggaatattattagtaggacaaagtatatatagttcttataagatgaataatttaactgataaaatatctaaaaataatgaaactaaaaatgaagagtcaatagattctaacttgactaagaaagaaaataatatagaagaaaatgaagatatgagtaaggcttctaatataaataagagtaataaaaacattaataaagaggctgatgtaaaatctaaaaaaaatactgtagaaaatgaagatgataaagattctgacttatttacagaggatgaattgatgtctaaggcgaatactttaaaatcagaaaaaaaaactaaatcttctatacaactatataagaaagttgcagatataggtgaaaataaagggaatacatctgaagcaacttatcaagttgctattctcagtgaaaagttaaaagactataaaactgctgaagaatattataaaatgtatgtagaaaattactcagaaaaagatgcttattttgatgaatcttattataatttagggatgatgtactataacaatggtgatttaaaaaattctaaattgacattaaagaagttagttaataaggtaccaaatagtatgtataataattcaaaagtaaaagaaattttaaaagaagaatagttaaattagataagaaaaataaattattttattttaaaataatatgattataatatattgacataccattttaaaaaatttaaaatattaattataaaatgaggagggataaaaaatggaatttgaaaaagggagtatttcaattcatacagaaaatatttttcctataattaaaaaatggttatactctgataaagacatatttataagagagcttataagtaatggatgtgatgcagtaagcaaacacaaaagacttgtatcactaggagaaatatcagaaaataagtcatcagattataaaattacagtatctgtaaataaaggagaaggtacacttaaatttattgacaatggaattggtatgactgaagaagagataaaaaaatacataaatcaagttgctttttcaggtgctgaagatttctttaataaatataaggataagatggaagagtcaaatgacataataggtcattttggattaggattttattctgcatttatggtgtctaaaaaggtacaaatagatacactttcatatacagaaggagcgactcctgtaagatggatatctgaaggtggtacagaatacgaaatatctgaatcagatgctagaaatgatagaggaactactataacactatttattgatgatgatagtaaagaatttttagatgaatttactgtaagaggaataataaataaatactgttctttcttaccagtagaaatatatttagaagatgttgaaagattagaaagagaagctaaagaagcagaagaaaaagctaaaaaacaaaaggaagatggaaaagaagagattgtagatgcaaaagtaattgagcctttaaacgacactaatcctctatggttaaaatctccaaaagactgtactgatgaggagtataaagagttttatagaaaggtattcaatgtatttgatgaacctttattttggatacatttaaatgtagattatcctttcaatttaaagggtatactttacttccctaaattaaaaaatgagtttgaactgactgaaggaaaagtaaaattatacaacaatcaagtgtttgtggctgacaatataaaagaagttataccagaatttttacttttattaaaaggtgttatagactgcccagacttaccattaaatgtatcaagaagtttcttacaaaatgacagggatgtaagcaaaatttctaaacatataattaaaaaagtagctgataagttaaaatctctttgtaaaaatgaaagagaagaatacaataagttttgggatgatatacaaatatttattaaatatggttgcttaaaagatgaaagtttctatgagaaggtaaaagaatgtatattattcaaaactattgatgatgagtatataacaatacaagattatttagaaaaatgtaaggacaaacatgaaaataaggtattttatgtaagtgataaggaacagcaatctcaatacattaaactatttaaagaatacgacttaagtgctgttgttttaaactcatcaatagatactcattttatttcatttatggaatataaagagaatggagttaagtttaatagaatagatgcagacctttctgatgtattaaaagataaaaatgaaaataaagatagtgaagaaaacaaagaagagatagctaagatagaaggtttgtttaaagaagctgttggagaaagagtgaagaattattctgtagaaggattgaaaaatgaagacactccagctatggtattagtatcagaacaatctattagaatggcagaaatgcagtcaagatttgctggaatggatttaggaatgaattttgaggaagaaaaaactcttgtaataaatgagaacagtccaataatcaaaaaattggtttctcttaaagatgatgaggaaaagaaagataagattacgcttatttgtaaccagatagcagatttagctttactttctaataaagaattaaagccagatgagttagattcatttgtacaaagaagtaataagcttatgagtcttttgatagaattataagattgaatttgaatacattgaagcaaatttataaaaagtattcaatatcagtgatgagaaagaagtgtctcaaaatgaacttttcagttcatgaggcgctttttttatgtgaaattaaatttattttaatcatttcaacaatgaaaaatatatttatctctattttgagacagaccgttctttatttttttatctttggttaatttttaaatatttaagtaggttctaataaaaaactctatttagttaaatatagttaacttgatatataataagataatacatataattaagtaaaagattgttttttagtttatgtttaaatacataattacactttgttaaaaacataaaattattactaaagtagaaataggaggttttagcatgaattttaattataatttgccagtaaatatcttatttgggagaggcagaattaatgatgtgggaaaagaagtatctaaatatggcaaaaaagtattgatagtaacaggtaaaaatagtacaaagaaaactggattacttgataaaacaatagatttactaaaagactctaaaatagaatatgaagtttttgatagagtagaacaaaatcctcttataactactatatattcaggcgtagaaattataaaatcaactggatgtgattgtgttttagggcttggtggtggaagcattatggatgctgccaagagtatagctttttcttataaaaacccaggagatttaaatgattatatatttggaattagacaaggtgaagaagctttacctataatcttagttccaacaacatcaggtacaggtagtgaaggaaattgttttgcagtacttacaaattcagaaactaaagataaaaaatctataaagaagaatagtatgtatgcaaaagcatcaataattgacccagaacttatggttacaatgccaaagcatataattgcatcagttggatttgatgcacttgcccataatatggaagcatatctttctaatggaagaaaccctcttgcagatgtacaagctatttatgggattgaacttatatcagaaaacctaataaaggtatataatgatgttaatgatttagaagcatgggaaaaaataacacttgcaagtactattggaggaatgacgattggtacagcgggtacagccttgccacatggaatggagcatcctgtaagtggtcttagagatgtaatgcatggaaaaggacttgcagcgttgactcctactattatagaaagttcatgggatattgatattgaaagatttggtaatatttcaaaggtattaggaggaacttgtgcagaagattgttcagatgcaattagaaatttccttaaaaaaatagatttagatataaaactaagtgatttaggtattgaaaaatcagatatagattggttaactgataattgtatgaaaatatcagttgcaaatattaagagacatccaaagtattttaataaggaacaaataaaggaaatgtaccataagtctttataatttgactttacatatttagttttatataaaaattataaattaataataaaaaattataagtaattaatagtaaaaaaattgtgtatagaagttatatatataataaacttgtcttaagcttttattttactttctaataaataaaggagtttaaaaaagggaagattaattaagtaatattttataaaattcttcgatttaaaaactttaagtagaggtgaaataaatgtttaatcccaaaagaataatattcgaaaaaggaactttagacactgatgtgggcaaaaaaatatacaataaatttagagataataaagatgtagagataattaatatatcatcaaataggattaaagaacacattccaggtgaaaatctatatgaacaatatagaagtgggaagcagactatggtagttgggattagaaaaagtctgaagtttcaaacatgtaaaccttctgctaattatcaactaccacttgtcagtggatgtatgggaagatgtgagtattgttatttgaacacacaattaggtgataaaccatttataagggtgtttgtaaatgtagatgaaatacttgaacagacaaaaaaatatattgaagatagaaagccacaggtaaccatatttgaaggggcagctacatcagacccagttccagtagagccatatactaattctttgaagaaaacaatagagttttttggaagagaggaaaaaggaagatttagatttgttactaaatacagtgatgtggatagcttattggatgctgaacataataatcatacagaaatacgatttagtatcaatactcctagaattataaatgaacatgagcattatacagcctctgcaaataaaagaatagagtcagctgtaaaacttgctagggctggttatcagattggtttcataatagcacctgtgtttttatatgaaggttggaaagaagagtataaaaatctgattataagtataaaagaagctttaccaaaggattttgataaaaaaattatatttgaagttatatctcatagatatacaactaaagcaaaaaatagaatactagagatttatccagatacactattgccaatggaaaatgaggatagaaagtttaaatacggtcaatttggatatggtaagtacgtgtatgataaagaacaattagatgatatgaaagagttctttcttaaggaaataaatggagtatttaaaaatagtttaataaaatatataatatagcaaatcttacctaaagatttgctatattttatttttatatattttatgtttataataaagcaatgagatttagcactatcatataagaaaattaaaaagggcactatctatcaagaacattttttctagttttgatactataaagggtaagagtaacaaaaatatcaggaggagttatagtatgcatgcatgggagtctattcaaattacattggatttaatagaagcaaatttatcagaagaaatatcaattaatgaattagcaaataaagcaaatttatcaccattttactatcaaagactatttaaaagattggtaaataagactgtaatggagtatataaagcttcgtcgtcttgcaagagcttctgaatacttagcagaacataagaatcgtatacttgatgtagctttaaattttggatttgctagtcatgagacatttacacgttcctttaaaaaagcatatggattaactccagaaaaatatagagcaaatccagtaaaactcaatcactttattaagccagaattaattttaaattatgctatggttgatgaaggtgttccactgattgcagatgatatagtgattgaagtcaatcgtaagacattgagtaatccaaggacatttgttggaatagaaatagaagtacctatttgccagttggtgggtggtgaaacaactggaattgcaatagtagaggaattatggatgaaacttggaagtcaaagacataatataccaaatcaaattccaggtggaaatgaatttgctgctctttatatgggaaatgcaaaagaaggaaattgtatgtatatggcaggtgtagaggtagagtcaggtacatcagtagaaggatataatacttttgagttgccagctaaagaatatttagtatgtggatttgaggcagaaaactttaatgagttagttaattcagctgtttttaaagcagataaatttatggaaagatggatgaagaaacataatttaacaactactgattttgcaattgagatgtattaccccactacacctgaagcagcatatctggaacattggattgttccggttcctattgaacaatagaaaggatgatgaatatgaattggcaagatgcgttttttcaagatactaaacctacatttgagcaaattaatgaatttattaataatccattatgggacaagttaaataaaactttggtttctacttataatgtagaacctaagcttgaatacagtaaatgttcaatgcaaagaggttggaatgtaaaatataaaaaaagaggtaaatcactatgtactttatatccacaagaaggttattttaaagctttggttattgtaagtgaaagcaatagagtagaggttgatttatttattaatacttgttgtgattatatcaaaaaaatatataatgaggtaaacttttttaatggaagtaaatggctaatgattcaagtagatagtttattggtattaaacgatatgcttgaactaattaaatttagagcttaacatatagaacaggatgaatatataagtcatcctgtttttatattcaatcagataaattaatatatagtctataatatgaataatttagtaaatttactttatctttctacattctttgcaactaagtccacatgtgtttttttcttgcatattagtagcaccccaattagcaaattgttgtaaaataggcacaatacttttacctttacttgttaatgtatactcaacttttggaggaatttcattatattgtttacgatgaacaataccagtagactctaaatcttttaatgattgagctagcatagtatttgtaatgccatccaattttctttttatgctactatatctaattggattttcaactgctaacatacatataataggtaatttccacttaccaccgacaatgtctaatgcataacggattggacaggttaattcttcaacgtttttagttatatttttttcagtatttatactcattttaattactccttagttatagtagtatcttttttatactttatcagaaaaaactgcatacttgttttttctgtattttatattaaaattatatcaaaggataatccttaatacaagtatttaaaaggggtgtaagaattatgaaagcattagaatttttgaacaaggcaggagtttattatttagcaacagttgatgagaacaatcaagcacatgtgcgtcctttaggatttgttatggaatacaatggtaaacttacattttgcacatctaatcaaaaggatatgtttaagcaacttatttttaatccaaaggttgaactttgttgtatagaccaaaaccttaatactctacgtattttaggtgaagcagtatttgttacatcaaaagaaacacaagctaaggcacttgaaataatgccaagtttaggtcagatgtactctgtgggagatggtaagtttgaaatattctctattgataaggcaaaagttagttgttgttcaatgagtggtaaaaagattgatgtagagctttaattataattgaatcgacatccatagtgaaaattaagaaaacgttattactgaaatattgatagatttaatttaagtgcaataaaaagatttttaaataatgaatatgtaaaaatttttagttattagatgtgtatttcaataatgatatactattttgaataattacatactagaaataagataattaaaatttactttataatgggatagatttcttttaaaaaatattttaactataattgatttttatttaatctgaaaaaaatattatgactataaaaaattgctacttattatttggatatttttgtatataaataataagtagcatgactttatacattaataatgatagaatataaattaatagataagatataattttaaaaggagtgatataatatgagtaaatatagttctttatgggaatatgttaagaaaaataatagtcaatcgtttaaattaacttttgaagaaataaaagatattgctggaatagagatagaccattcgtttttgaaatataaaaaagaattaaatgaatatggatatcaagtaggaaaaatctctttaaaagagaagactgttattttcaataaaattgattaagatataaataattacatataataaaataatttgtattgacgattattacaaataaaaataaagtaaatcttatataagatttactttatttttagatgatatttttttagctttatactataaggtatataaaactaagcctattaaaaatgttataatttctattaccatcatagaccatatcaatccatcaagttcataaaagtaattaagctttattaaatagcttctttattataatttctttatttcatataatataaatagtattaaaatttttatgggagttaaagtaagcatgtattattacttagatatttgtataatcaacatctagtaatttacctttttggtgaaaatgattaataagttttttaggataattcattattaattcatctggaaaattaatttcctttaagatattctcagaatactcatagttacctatgtcaaaacaaatgtgagcatctgaagttagtatgattttagcaccatattttttgcaaagtgtagcaatatacttacagttatccgagctaccatttcttgacacgcctttaatagaacaattatttatttctattaagatattcttttctatagctaatttaatgattaattcatagtcgattgggtagtttgggtttccaaggtgtcctaatatttcaatattatcatgcttatttattgcatttattaaagctttagtattattctctaatgtatttggagaaaaaacagcttcgtgaaatgacaagataagataatctaaccgaggaattacaaaaggctctaggtctatgtttcctttaatatctagtatatttgcttcacagcctcttaaaattataatgttatttatgattcttgggatattttgaatgttgtgaaagtaccatctgtggggagaaccaggcatcttaggaccatgttcagatgtacctagtatcttaattccattttctttacaataattaatattttctagtaaagtgctatagccatgaccactgactatagagtgggtgtgtaaatctgataaaaaattcatataaattcctcctctataaaagatgagggtaacgtaatttatattataaaacgaataggaaagaaaatcaatagttacataattagacaaaaatattaaaatattgtagaattaagcttaataataaatgtttaacagtattactgcttataggggaggttaactatgacacaaaagaagctatcaaggaaagaaaaagttttaatttgcttgaaaaggttaacagaagaacacttgaactttaataatggcattagatttggatttgatgcagaatatatagctactgaagtaggtataaatagaagtaatgctagtaaggaattaaatcaattaataaaagaaagtattattataaagataaagggtaagcctgttcagtacttatataaagaaagtattgagagtattttgggaaagaaactaaataaagggatatttgataatattaactctataaacgaatatagtgaaaatgattctatcaaagatgagtatattttagagagtataaaaaaagagaacaatatttttaatttagtaggatgtgatggaagtttaaggtcccaaatagaacaggctaaagcagcagtaatatatccacctaaggggttgagtacattaataataggacctacaggagttggtaaatctatatttgcagaatatatgtataagtatagtttaactataaaagaagatagtgataatgcaccatttatcatatttaactgtgctgattattctgataatcagcaattattattagcgcagctttttggatatgtaaaaggagcatttactggagctgataaagataagtatggtattgtacatgaagctaataatggagtattgtttttagatgaagttcatagattatctgcagagggacaagaaatgctatttctgcttatggataaagggatatatagaaggttaggagaggctaataaggtacacgagtgtagagttatgataattgcagccactacagaagacccagaaacagcaatgttggaaacgtttttaagaagaatacctgtaactataaagattccgtctttagaggaaagaggctttcaagagagaatgaagcttatatgttatttttttaaagaagagagtgttaggattggtgttaagttaaaggtttcaaaagaagttattaaggcatttattttatataagtgtaagggaaacataggccaattaaaaagcgatatacaattaatttgtgcaagagcttttttagattatatgacctataaaagggaatgtgtatatgtaaggctctctcttctaccaaataatattagagaatcattatatggaaataatagaaaagaggagtttgtacaaaatttcagttttattggaaaagatgatattatttttttaccagaagaaaaggattttgaaagtgaaaatttattaatagaaaataaaaaatatgatttagatttttatggaatgataaaagaaacttggaataaacttcaacaagaaggtattaaagagtcacaaattagaagtgttatagatggagacatacagaagtattcctataatttaatgaatacttttatatataataatagtaatcaaacagcttataacaacattgttaatgattcaattgcaactactgtaaaatatattttacaaaagcatgataaatggagcaaaagagaaggattagataaattaataaaagctatagccttacatattcagaatttaattgaaagaataaagattggaaatatagtaaagcatcctaataaagatgaaattatgaaggaaagagcatatgaatataacatagcaaaagaaatattatctaacatgtcattaatgtatggagtagagtttccagaagatgaagcaatttttttagcaacatttctttatttatcgtatgtgggattaaatgaggagagtatagcaatattagtcataatgcatggtgaatctacagcatctagcatggtgaatgtagccaatactttactggattgtaaccatgcagtggcaattaatatgggattagaagatagagttcaggatattttagtacaagctgtagaaatagccaataaaattgataaaggaaagggaattttaattttaactgatatggggtctattttaacatttgctaaagttattcgtgatgctacaggaaaagaagtaaaagcagtagatatggtaagtacacctattgtaatagaagcaactagaaaggctctaactccagaaatgacattagagaaattatattttaatattatagaatctataaagaaacattatggagatatggaagttacatatgctgaaaaagataatggtggtagatattttgatagactactaattgataatattagtaaaactttgacttttttaaatggggaaaaggcttattttatattaaaagaagtaattaatagaattagtgaacactattctttagtaattcaagatgaacttttagtaaagtttatatttcattgttcatgtatgattgaaagagtaataataaaagagtctttagtttataaatcatatgaagaaagaattagtagaaataaagaattatatttagttataaaagaaagttttaagctagtagaagagacattcgatataattatttcagatatggaatatgcaaatatattagatatatttgaatcacaatatgatacagataaattcaaaagttgatacaaaatttaaaaatagccaaaaggctatcttttttttactttttttgatacagatttgatacaggttgaaaaaatcttttgatacatatcgaaataataagtttttaaaaaaaattgagtaaaaagttttgattaaatcctgtaaaatagccatttattattgatacacataagttggcacggcaattgcttatataaaaagtgacaagaaaagtgaggtgaaattggtgataggaataatagttatgactcatgggagttttagtgaagaaattataaaaagctgtgaacttattgcaggaccagcagaaagaacagcagcaattaaactaaataggaatgataatattgaagacttaaataaaaattttgtagaaaagttaaatgaattagatgaaggtgacggagttttagtattagctgacctattaggaggttcgccaagtaatgttgcaagtttaaaccttaaaaaaggtggcaagtttcatgcacttactggagtaaatcttccaatgctacttgaagctttaattaatagagagggaaaaagtttagaagagttagcagaagcatgtattgaagcaggacaaactggtataaacaatattaataaagttcttagctcaatgtaatagaaaaaggagtttgattaaaaatgtctttagtaaaatattgcagatgtgatgatagattaatacatggtcaagtgatatataaatgggttaagcatctaggtgtaaaaaagatagtagtagtagatgatgaaacaaccaatgatgttattgctaaaggtttgataaaaatggcagcaccaaagaatattgatttatcaatattaactgtaagtgaatcaaggagatatttttataataatcaagctgatgataacgtttttgtattaattaaaaatttagatactgcaaatagaatgatagaagaagggattaatatcaaaaaacttattgttggaagaatacctacaggaataggaaaaaagaaaatatctcaaaatgtatacattaataaaaaagagtttcttttaatagatgaatttattaaaaagaatattaatgtatcaattcaaatggtacctgatgaagaagaagtagaattaaaccaaaatattaatcgctataaaggagagtttatttagcaatgaataaatataaggtaattatactgtgccatggaacttggggaaaagtcttagtagaagaaacaaataaaaactttggattgtcaaatcaatatgaagttttatcactaagttctgaaaaagatgtttctgtatttatgaaagaggttgaagaagtagtagataaagaagatgtgaaaattataatatcagatttatatggaggatctacatcaagtgttgcaatagctgttgctataagaagaggaatagatgcaataaatggacttagcttacagacaattttaatcgtagatgaagaattaagcaaagaagataaattacatacattaccagaaagaatcgtcaaaaaaaataataacctttgtgtggatttaattaaagaatttaaaaaaatataaattatgaggtgaatataatggcaaaaataacattagtaagagtagaccacagattaattcatgggcaagttataacaaaatgggtaaaaatcgctcaagctcaaaaaataataatagttgatgacttcttaggtcaagatgaatttatggctgacatatataaaatggcagcaccatcaggagtagaagtagttattttaacagcagaagatgcgggacaagcattccaaaacaacactttaggagataaaaatatatttattctatttaaaaatgttgatatggcaaataaggcttataaagctggacttaaatatgaaaagattcaattaggaggtattccaaatgaagcaggaaagaaaatggtgtttacagctgtttcattaggaaatgaggatgtagaacaacttaatgaacttaatgaaaatggggttgaaatagtcctacaagttataccagaggaatcatctatgacatatgaaaatgcgttaaagaaatttaaataaaaaatataaattaggaggaattataaatggaatctgttttgatgttggcaattgtaacaggattatggtattggtttgcagcaggtcttgcagggtatacccttttctcaacactaaagtctcctttatttataggttttagccttggattactttggggtgatgtaacaactggtatgattgttggtgcaagtatagaaatggtttatctaggaatggtcgcagcagggggaaatattccatcagataaatgtctagctgctcttattgcaataccagtagcacttcaaactggtgttaatgcagaagttgcagtatctattgcggtacctttaggtgttataggagtattagttaataacttaagaagaactggtaatgctgtattggttcataaggcagataagtatgctgaagaaggtaatacaaaaggcatctggagatgtgcaacactttattctttaatatttgggtttgttttaagatttccaatagtttttgtatgtaacttttttggagcagatttagttcaatcattattagatgttataccacaatggttaatgaatggattaacagtaatgggcggtatattacctgcattaggttttgcaacaacaatatttactataggtaaaaataaattcttaccaatgtttattataggattttttatggttcaatattttgaaatatcaattactgcagctgcaatatttggtgtttgtatagctcttttaattacctttatgaaagaagacaaaagggtaggtgaagtataatgcaagaaataaaaaataaagaagttaaaaatggacaaggtccaactgaagttaataagacaagagtactcacaaagaaagatgtaacaaaaacatacctaagatggtggtggacagcagagttatctaattcttttgaaagaatgcaagcattagcagtttgtgcaagtttcactccggctttagaaaagttatataagaaaaaagaagatttagtagatgcattaaagagacacttacaattttttaatactcaagctatatggggaggattaattcatggtacagttttagctatggaagaagagaaagctactgaaggaaaaatcccaggagaagttatttcaggtgttaagaatggtcttatgggacctttggctggaattggagatactttagattttggtacatttcaaacaatattcttagctttaggtgcttcatttggagcagaaggaagtgttataggtgcatttttcccaataatgtttagtatattactattttgcgaaggttattacttatttcatttaggatattctttaggtagagattcaattaagaaaattctatcaggtggtattgtcaataagataattgatggtgcttcaattctaggaatgtttatgatgggagcattatctgcaactacagttaagctttcaactccgctatcatttgatattggtggtaaagcaattgttgttcaagatacattaaatatgattgctccaggtttattaccacttggtgttgtattcttcgtatattggggaatgaaatacaagaagtggacaataactaagttattagtaattttagttgtattagcattggtaggatcattcattggaatattctaattcacagtgattaaaatatagaatttaattttaggaggagaaagaaatgtcagaaaaaatgtatacagaaaaggaatatttagaaggaattagaggagcaacaggagaaagagcagtatggttctatcttcttatgaaagaagctgaaaaattaggagctaatccagatgatatatgtaaagaagcaatatatggatttggtaaaatgagaggtcaaaaatataacgtagcagatactccaggaaaaatggcagaaatgttatataacagtaaaggacaaaaagtgtttgaaatggaattagtagaaaatacagatgagaatggcgttttaaaattccatcactgtccattagatgctgcttggaaagaatatggattaactaaagaagaaagaaaagaaatttgtagattagcttgttatggggattatggaagagttgactgtgcacaaggtgttaaattagattttgctcaaaaatgtgctcatgatgatgaagtttgtgaattagtatttacaaaaaaataatttttaatgctaaaagcctgttctttaaggacaggctttaaaaagatagaaagtaggttgatttatggatataagcagaagtgtagataatagtttaaatagaaccatagaatttctaaaagaattgataaaaattgattcacaacaaggtgaacctatttcacaatgtccttttggtataggacctaaaaaatctttagataaaactttagattactgtgctagtttaggttttagtgttaaaaatattgataattatattggatatgcagaaattggagagggagaggaattaatagggattccaatgcatttagatatagttccaccaggagaggggtggagtgtagacccattttcgggagcagtaattgacaatattatttatggaagaggtgtcatagataataagggtgctgtatctatgcttatacatgtattgaaaaacatagaggatatgtatcctacaattaataaaagaataagattaatttttggtacaaatgaggagacagatatgaaatgtatcaaatattacttagataaaggtgaagaaattccaagtatgggatttactccagatgctatgtatccagtggttaatggagaaaaaggaagggttcatataaggatagaaaaagaaattaaaattgacaaaagtaaaccttacataatagtaaggggaggaactaaagaaaatgttgttccatctcattgtactgcaaaaattattaatggaattatttcagagttaactactaaaggagtagctgtacatgcaagtaatcctgaaaagggagaaaatgctatatctaaaatggtaataaagatagttgaggataatatggattttcagcatagagaagatatagaattagtttcaaaatacctttgtagtgattattatggagatgcattggggattaatcaatatgatgaggtattcaaaaacactaccttaaatttaggaatattaaaagtaaatgaggaaaaaatcgtatgtgagttagatataaggtatggtaaaaatatagttttaaataacataatagatagattcaaaaaggttttttgtaatggttggaaaatagaggttattgctcataaagacttacattatgtggatgagagtaatttagtacttaaaaaattattagaagcctatgaagaagtaacagatgaaaatggatatacaattgctatgggtggtggcacatatgcaagttggtttaaagatatggtggcgtttggacctaagttcttagcgtataaaactggtggtcatggagtagatgaaagagtaccaataaatcatatacgaaagaatatggagatatatactttggctttaataaaactattagaattgtaaaagaagaagagactttatgtgcaaatttacagatatcttaaaaagagagataaaacgagttcaactttatttaaatgttcaacaccatcaaatggggctgtctcaaaatagagataagcctcttgcttattattgaaatgatgaaaatatattttacttcatacaaaaaagagtgccttatgaagtaaaaagttaattttgagacaccctcatttgatgatgttgaagagaaaataagtatgaaattattaaaaaaagatgattttataaaagttaaggttgaaaataaaagttaattgaatggaattagataaatggagaaggctgtatactatctaataaaataacaaaagagtgttataaaactggttatatgattagagaaaagtctattgatacttatccagatagtggacggggatttatgacttgggatgaaaatggagaataataaaaattatagtttatacaatttaataagatatatgtacaagcagttaatctaaatgattgactgcttttcttttatagatttttatataatagacaattactaatacatgatagttgcctgttataattagaggaatagatacgaataataactttataaaagaattaaatggaaaattgaagagttatattcaggattttaaaaagaatatgaaatgagaaatgaaaataaggtgtttatattaaaagaggttttacacaaaatacttaaaaacgtgataaataaaaactgtatttagataaattaactactagttttatatataatatggattttgtttacaaagtttacatatttcacaaaatatttttaaaatatatttaaaaatatattttatatacttgttcgtttgtttctctgtggttgattttttcgtcaaaagtcaacttcaaatcgcttgttagctttacatgtttaaggatataattatacataaggagggattgacatgaatgaattaaacatcgcaaaaacgctgattttaaagcgtaaagaaaaaggaattacacaagatgaacttgcaaattatataggcgtttctaaagcttctgtatctaaatgggaaactggacaaagctatcctgacataacctttttaccgcaactcgcgacatatttcaacattaccgttgatgagttaatatgttatgaacctcaaatgatgaaggaagatattaataaactgtataataaactgtgcaaagactttacggttaaaccgtttgatgaagtcatggatgaaataagagaaatcataaaaaaatattattcatgttttcctttgatttttcggatgggtcttttaatagttaatcactatgatattgtagatgaaaaaaagcgtgaactattaattagtgaagcattagaaatatttattcgtatacaggaaacttgtaatgacatagatatttgccgtcaagcaaaaagtatggaggcaacttgttatatattgttaaatcaacccatacaagtgattgatttattgcaaaacagcaattttcccatgataaatgaatctatacttcttgcacaggggcaaatgatgaatggtcaaatggatgaagcaagagaaacatttcaacttggtgcatatcagaaccttatatcattagtccaaaatctagtgggtattttgcaaaatgcagataaattacaaatgaaggaaatagaaagacgtattctagcaatttcagatatatttgagcttgatacattatctcctgctattatgctttcttcatatttaacacagacacaaattaatttaatacatggggataatgaaggagctattaaatcattacgaaaatatgtagatttagcaacacgtgatatatacccaattataatacatggggatgacttttttaataaacttgacagatggatttctgaaattggaacaggtattacacgtgatgatacaatcgtaaaagcaggtattgttgctgctattaaaaataatccaatgttttctttattaagtgaaaacaaagaatacaaatttcttatagaaaaattatctttattggaggaataagattatggaaaatttgatggaatatttaccacttttgattcctgttattattttagatttaatacttataattactgcacttgttcatgtattgagacatccaaattataaaattggaaataaggcaatatggattattgtagtactgtttattagtctaataggaccaatcttgtattttacaataggaagaggtgaagaatgatgaatattgtctcaataaatggattatcaaaaggttttggtaatcgaaagataatagataatctaaattttactgtaccagaagggtcagtctttgggtttgtaggtaagaatggtgcaggtaagactacaacaatgaaaatggtacttgggttacttgaaccagatagtggaactatagatgtttgtggtgagaaagtgacatatggaagaacaagttctaatcgtcatgtaggttatctgcctgacgttccagagttttacaactatatgagaccacttgaatatctttctctttgtggtgaaattacggggctttcaaaaaaagaaataaagataaggagtgaagagttgttatcacttgtggggcttggcaatgaaaagagacgaataggtgggttttctcgtggaatgaagcaacgacttggtatagctcaagctttgctttcacgtcccaaattacttatttgtgatgaaccaacaagtgcacttgaccctgttggtcgaaaagaaatattagatattatgcttaaaatcaaagactcaacaactgtaatattttcaacacatatactatcagatgttgaaagaatctgtgaccatgttgctatactaaacaaaggaagcattgctcttagcggtacactttcagaaataaaaagtatgcacggaaaggatagacttttactggagtttgcaagtaataatgaaattcaaaagtttaagtctagtggtggcattaaatccttactaaaagattcagaagaaactaatatggaaattgttttgcatggtaaagatataaaagcaatacaaaaaacagttatatctacactcgcagaaatgaatctttgtccagtaaagatggaactaatagaattgtcacttgaaaatttgtttttggaggtagtaaagtgagagaatacatagcatttacaaaaaaagagtttaaggagaacataagaaattataaattacttagtttgactattttatttttagtatttggaataatgagtcctctttctgcaaaatttatgccagacttgattgctcattttgctccaactttaaaagttactactgcaccaactgctttagattcttggacacagttttctggaaatatttctggtcttggaacgagtttaactctaattgttttttgcaatattttatcaaacgaatattctaaaggaacactcgttattatgttgactaaagggttatcacgttcatctgtagtattgtctaaattttctattgcagtaattattatgacaattggtttttggttgagctttttatgtacttatggatatacaatgtatttttggccaactgcaaatcttaatcatattatattttcagcatttaacttatggttaattagtattatgtatatttccatattaattcttgggtgtgtactatttagaccagcatttgcaagtgtgttacttgtattagcagcaactgctattttgagtttgatttctattcctaaacagattgcaccttatacgcctaatttcatattatcaaaaaatatagatttagtttcaggtaaagtgacacctccagaatttattattccaatcattgtaacaattgttatttcgatagtatgtctgttattagctgttgttttgtttaataaaaaagcagtttaaggatatttttattataaatacaaatagtgctgtattgtgggaaaatgtgtttagtattgtagaagaatatatttaagtaaaaaagaggctgtctcaagatagagaaataagcctcttttttattttagtcctcctcactatactttataataattaagttattaccttaaggaactatctaaaaaaagagatatagattataatctaatgcttatcagttatttgaggtgtttagtatatagagtctaaagtagtgaaggactaaaataatattgttttcattaaataaagataagaatctttaattgtggtaaaatatactaaaaaatcattttaaaagtgataaaattattttaagtaaatattttaaaggggtgtagatatggaaaagtcaaaagtatatttttgtgatttatactcaaattcgcaaaataaaaacgtaccaaacaatgtaagaagattatttgatgaagcaggattcaaagatttaatagaaaagaatgaccaagtcgcaattaaacttcactttggagaaaagggaaatactacatatatgagtcctgtggcagttagacaagtggttgataaggttaaagactgcgaaggaaagccatttttaacagatacaaatacactgtatacagggagtagaacaaattctgtagaccatcttacaactgctatagaaaatggatttgcttatgcagttgtaaatgcaccagtaataattgcagatggattatatagtagaaattatgagaatgtaaaaatagacaaaaaacattttgaaagtgtaaaaataggtggagaaatttataattcttctgcaatgatagtaatgagtcattttaaaggtcatgaagcagcaggttttggaggagcattaaaaaacttagctatgggatgtgcaagtgcagcaggaaaacaaatgcaacattctgatgttactccagtagtaaaggaaaagaagtgtgtaggttgtggaaagtgtgttaattcttgtcctacaaaagctataagtatagtggataaaaaagcagttatagattctgatgtatgttatggatgtggagaatgtccaactgtctgtccaactagagcagtaactatacaatgggaaagtgactcagatgtgtttgtcgaaaagatggcagaatacgcttatggagcagtatcaaataaaaaagacaaggtagggtatataacttttgttatgaatgtaactccactttgtgattgtgtaccttggtcaggtagaccaattgcccatgatataggaatattagcatcaacagaccctgtagctattgaacaagcatgctatgatttgatttgtaaggaaatgggtcatgatgttttcaaacatgaacatcctcatgtaaatggaactagaataatagactatgcatgtgaaatgggtatgggaagtaaagaatatgaattaataaaattataagaatagtagcacttaaatgcatataattattgtaagagaaatctaaaagtatcaaaggagtatgcatttatgaaaatttactatgagaaggaaaacagcaagaaggctaatgtaaacaatattccaagtgtatttgcgtttaattttctaagaaactttttgactagcaaagagtatgaggaaactagaaaagaatattttataaataatctaacaaaaagtcaggttaatcaagccatgaaggatttaaaatggctatttagagaatatgaaggcttagaggttattacaatggaaagcttggatggagttaagacaaggatagttttataaaccagtaagaattatattctaataaaaaatactgctttaataataatatgtataatctatatactaatattattttgaagcagtatttttttgtgtatagtaaacttgtgtctaaaataaagttgaccaataaatgttatatatgcaatactatatataataagtaaactacataaaaatattaagttgacaaataggaggatatatggaaaaatacataataaaattaaaaaataaagtattgagagaaaaagaaataagttatgaagaagctcttaatttaataagccttgatacaaataataaaaacgattttgatattctattaaaatctgcaaatgaaataagagaatattttatgggaagaaaagcagatttatgtacgataatgaatgctaaatctggcaaatgtagtgaagactgtaaattttgtgctcaatcatctcattataaaactggtgtagaagaatattcattattagattacaatgaaatcttaaatagagctaaagagatggagagtaaaggagtgcatagattctcattggttacaagtggtaaaggtatgtcaggaaaggagtttaataatattttaaatatctatgaaggattgagggaaaatactaatttaaaattatgtgcatctttaggtattatagattatgagcaagctaaaatgttgaagtcagcaggtgtgactacatatcaccacaatgttgagacgtgtagagataattttcataatatatgtacaacacacacatataaagataggataaaaactataaaagatgctaaaaaagctgggctagatgtatgtgtaggcggtataattggaatgaatgagagtgaagaacagagactaaaaatggtttttgaaatacgagaattaaatgtaaaatcatttccaataaacattttaaatcctattaagaatacgccaatggaaaattatgatgtattagaaccaatggaaatactaaaaacaacagcagtatttaggtttataattcctaatgtgtacataaggtatgctggtggaaggctatcattaaagggatatgacaaagttggatttaatgggggagtaaattctgcaattgttggtgattatttgacaactgttggaagtgggattgaaaatgataaaaaaatgattatagagcaaggatttgaactttaataaatactacttaaattaattaatatacttttagataattataaaagtatattaattttttttgcagattaatttaaatattaaaattgaattataagttgcaatattttgaaaaaagggaaaaatatcaaaatttatataaaatggttgcaaatgggaaaaggatgtgatagtatctaggtaaccggttaagtaaaacggtttcctaaattttgggggtgaacttcttgagtataactataaaagaaattggcgaattggctggtgtttctaaaacaactgtgtcaaaagtcattaataataaagatgaaaatataagtcaggcaacaagagaaaaaattttgaaaataatgaaggaaaaaaattatgtaccaaataaattagcacaaagtttagtaactaaaaaaactaatactatagggcttcttataccagatatacgaaatccattctttacagatgtatcaagaggtgtagaagacaaagctaatgaagaaggctacaatataattttatgtaatacagatgaagatgctaaaaaagaatatgaaggaataagaacactatcagagaggatgatagatggaattatatttgcagcatcttcaaatacaaactggaaagaagcaaattataaagatataaaaataccaactgtcttgattgataagaagataagtatgaacaaagaaaccttaaaaggaattgttaaaataaataactttgaaggggcctatatagctacaaaacatttattagatattggaaataagaaaataatatacctaagtggtccacttcaaaatgaaatagcagtagatagattagaaggatataaaaaggctctaatcgagtgtaatttaagctacaattctgcttatgtatttgaaggaaaatataagattgaatggggacaagaatttataaaaaatttagaaaagatagattttgatgcaatattttgtgcaaatgatttgattgcaataggtgtcataagaggtcttaaagaaagagggttaagtataccaaatgatgtaagtgtcgtgggatttgatgatattcaaacatcaagtctaataagcccttctcttaccacagtaaaacagccgtcttatgatataggatataaagccagtgaaatattgataaattgtttaagaggagataaaaaagaatcatttgatgaattgattttcaaaccagaattagtcataagagattcaacaaaagaaagtgaataacagcacgagagacataaatagatatgtaaaggagtaatgtaatgggaaacatagttgtcataggaagtgtaaacatggacatggtatgttctgtagataaaagaccagaaaaaggagaaacagtattaggtaatagtttttttacatcacctggagggaaaggggctaatcaagctatctcagcttctaaactaggagcaaatgtaaaaatgatatcatgcataggggaagatggcttaggagaggagttaataagaaattttagaacgaataaagttgattatagtttagtatccagaaataatcacaaaagttctggtgttgctgttataacattatgtgaaaatgataatagtattgttgttgtaccagggacgaatgagctagtagatatagaattaattaaaaagaatgaagaagagataaagaatgcagatatagtattgctacaattagagattccattaaaaacaataaattatgtagtgaatttctgttttgaaaataggattaaggttttattaaatccagcaccagcagtaaaactaaatgaagatataatagaaaaagtaacttacttaacaccaaatgaacatgaatataagatagtttttgacacaaatgaagggatagaagaagtattaaaaaaatatccaaataaacttgtaataacagaaggaaaaaatggagctagattttatgatggtgaggaaatcaagcatgtatcttgtataagtgttgatgttcaagataccacaggagcaggagatacatttaatggagcattggcagtggctataacagaagggaaaaaattatatacagcagtagaatatgcagtagtagtatcaggtctttctgtaactaaactaggtgcacaatctggtatgccttataaagaagatgttgaaaaatatttaaataataaataaaaatctaatttgttcaaatttaaaactattaaaaatggaggttaattatgagagtgagaaaaattttatctttaggaattgctggaatactagcaataggaatgttaacagggtgttcaatggaaggaccaagtaaatcagataataaaggtggttcagacaagaaagatttaactattggagtatctacaataactcttcaacatcaattttttatagatattgatgagggaataaaagaaaaagctaaggaattaggtgtgaaagttatagtaaatgacccagaccaagatgtagctaagcaaacatcagcaatagaagattttatacaacaaaatgtagatggaatgatagtacttggaactgataattcggctatagtaccagcagtagaaggagcatttgaaaaaatgccagtagttacagtagatgctgtattaaatactgaaaatattacaagttatgtaggaacagttagttatgatgctggtaaaaaattaggggaatacactaaaaaatacatagatgaaaagttaggtggaaagtcagaaatagcaatagtgacagatttaaaatctcaaatacaaatgcagagaatagatggatttaaagatgcgttaaaaggttcagcaaatgttaagatattaaattcacaaccaggatatgacagagaagaatctcttaatacagtagaaaacttaattcaatctaatccagatgtagatataatatatgcaacagctgaaaatagtgtactaggagctaaagctgcacttgaatctgcaaaaaataaggatgttaagattgtaggatttgacttaactgaagaagcatcaagtggaataacagatggaactattcttgctatgattcaacaacaacctaaagagatgggacgtttagctgtagaagcagtagtaaaagctataaaaggggaaaaggtagaaaagaatataccagtaccagctttactttatgataaggaaaatataaaagactttaagaattagtaaaataaaatgagattatttgaaagaaatcctatttaaaaaggagtgtcattatgagtaatataattctgaagttaagtaatattgctaaagaatttcctggtgtcagagcattagataatgttaattttgagttatttcatggcgaagttcatgcactactgggtgaaaatggtgctggtaaatcaacaatgataaagattttaactggtgcacattcgaaaacttctggaaaatttatttttgaaggcaaagaaatagagaatatatccccagatatctctaaaaagataggtataaatgccatatatcaagaactaacagtttttgacgaattaacagtagcacaaaatatttttatgggaaaagaaataaatggcaaagtcttaaccaatgacaaaaaaatgaatgaagaggctaaaaagattttcgataatatgggaatagatataaatccaaatagtttagtcaaagagcttagtatagctcaaaaacaaatggtagaaatagcaagagttttatcatcagaaactaaagtattaataatggatgaacctacttcttcaataagtaaaaaagagactgaaatactttttagacttataaatgatttaaaagagagtggagttagtataatatatatatcccataggatggaagaactctttgagatttgtgacagaataactataatgcgagatgggaaaacgatttcgactttgaataccaaagatgtatcgtctgaggaagaattagttaatttaatgatagatagaaagctagaccaatttttcccaaaaagaaaagtagaaataaaagaagaaattatgcgagtggaaaatctaactaagaacaatgtttttaatgatattagctttaatataagaaaaggtgaaatattgggaataggtggactagttggaagtaagagaagtgaaatagtagaagctatatttggacttagaacatatgattctgggaaaatatatttaaacaatgaagaagtaaagtttaaaactccatcagatgcaatagaaaatggactgggattaataacagaagatagaaaaggtactggattgtttttacaaatgagtgtcaaagaaaacacaactatggctgggttaaaaaagatatctaagtttaaatcaattatagatagaaaaaaggaaaaagagattttagaaaaatacatagaagctttaaagataaaaacaccacatatgaatcaagttatacaaagtttaagtggtggaaaccaacaaaaagctataatagcaagatggcttttattacaaccagatatattgattatggatgaaccaaccagaggtatagatgtaaatgctaaggcagagatatacaatctaatgggagatttagtggagagtggtgtaagtataataatgatatcttctgaaataccagaattaatatcaatgagtgacagaataatggttatgagagaaggtcatataagtggatttttagaaggtgaagaaatggttgaaaataatgtattaaaattggctttcggaggtaaaattaatgagttcaataactaagcataaagaagaaaaatcttctccattattgacaaaattaacaagtgtatttagagaccaagggagtgcagctgtaggacttgtaataatttttataataatgagtgtagcttcatctaactttttaactttagataatttaattaatgttggaagacaaatatcaataaatgcaatacttgcagtaggtatgacatttgtaataattacaggaggaatagatttaagtgtaggagcagtaattgctttagtaggtacattttgggctacaacagtagtgaattataatgcacctatatgggtaggtatgatacttgcattagcaatagggacaatattaggagtcataaaaggtgcaattatttcaacacaaaaactacctccattcattgtaactttagccatgttaacgataataagtggggcaagctttgtatttacaggaggaagacctatatcagtaaatacagatgcatttaagatgctcggtagaggatatattggaccaataccaataccagttataattatgattatagttgtaatagcaggacattttctattaaaaagaactaattttggacgtcatgtacatgcagtaggtggaaatgaagaggccgctagattatgtggagtaaaagtaaataaagttatagtaaaagtatacgcactagctggactactaacagcattagctgggataatactatcatcacgtttggcatcaggttcaccaactgttggagatggagcagaattggatgctatagcagccgttgtgcttggtggtactaatatgatgggtggttctggttctatagtaggtacatgtataggtgtcggaataataggaatattaggaaatggattaaacttattaagtgtatcttcatataatcaaatgattataaaaggtttggtaatgttatttgctatatggataaataatataaaattaaaaaaatcagctaaatctaaatagtaattaaattttagcttataaactataaaaattattaagtttttgtatatatttttatactttaatttgcatacatctttatacattgaatgggaatatgctaagtgaaaaagtttactatggcttaaatagatgagattagacttgaaattttaaatgtaaaaataaatcttaggaggaaatatgaaaaaaattctcttagatacattaaatagtaaaaaacaagaatacatagattatttaaaagaacttgtaagtataaagactgaagatgttggtcatggaatactaggtggatttgaaaaagaaggacaggaatatattgaaaaacttgcaaattacataggttttagtgtagatagacaagaaatgagcgaagaattaattaaaaaagcaaaaaatatatataaagaaggaaatctaggtcacaattatcaagatagatataatttaatttgtaagtatagtgatgatttacctggtaagacaattgtatttaatggtcatgtagacactatgccaccaggtgatataagtaagtggaaatataatccatatcgtgctacagaagataatggaaaactttatggtcttggaactgctgatatgaaatctggacttatagcatcaatattagctgtaaagcttataaaagatagtggtctaaatgtacctggtaatgtaaaaataatgtcagtagtagatgaagaaggtggcggaaatggtaccataaatgcagttatgaatggtattggtggagattgttgcataatttgtgaaccatcagaacaaaacttaatagttgcacatatgggatttgtattctttgaagttgaggttaaaggtgtgtctcttcactgtggtagtaagtgggagggtgtaaatgcaattgagaaggctatgttgttgcttcaagatataaaagagttggaacataactggcttatgatatataagcatccactattaccttcacctacaataaatttaggtgtaataaatggtggaacagcaggttctactgtgccagataagtgtgtatttaatttatgtgtacacttcttgccaaatataatgagttatgaacaagttgtaaatgatgtaacaaatgtcataatgacaagggctaatggagatttatggcttaaagataataaaccaaatataaacatatatcaatcagggttaggttttcagatggacaaggattctgattttgtagtgaatgcacataaaatactagaagaaactttaggaaaaaaattagagataaaaggttcaacagctggcaatgatgcgagattaatgaaaaatttagctgaaataccaacacttatattagggccaggttcaatagaacaatgtcattcaattgatgaatatgttgaaattaaggagtatttagatagtatacttatgtatgcaagtctaatattaaacttataaaagtaggaggaatatataaatgaaaaaagtattaatagtaggggaatcttgggtaaaaaatataactcatataaaaggatttgatacgtttgttacaactcattatgaagaagctgtaaagtggttgaaagaagcaatagaatctggaggatatgagacagttcatatgcctgcacatgtagcagcagatagttttccgtataaattagaagagttaaatgagtatgactgtataatattatctgatataggttctaatacgttcttattatctaatagtacttttatagattgcaatagtaatccagatagacttgaactaatcaaagagtatgtaaataatggtggggcgttaatcatggtaggtggatatatgtcatttacaggaatagatgcaaaagctagatttggagaaactgctatcaaagatgtattaccaataacaatgatagataaagatgatagagttgaaaaaccagcaggaataattccagaagttattgactctgaacatccagtattaaaaggtataccaacagaatggccaaagtttttaggatataacaaaacagtagctagagataattgtcctgttttagcaactattggaggagacccatttgtagctgttggcgagtttggaaaaggaaaatctgctatctttagttctgactgtgcacctcactggggtccaaaagaatttactgattggaaatactataataaattatgggttaatatgcttgattggttaacatgctaaaaattttataaaacttgaaaacctcttacttgataaaatgaaacttacaagtcaagaggttttattgtataaaatggttgtatggtagaaaatatttttaaatcagttaaaattagtcattttggctgataatcgataagttattagaaacagggaggtttatataattaatatggataatttaaataaaaagtttttgatggaatatatagatgagatacagggagaattaagagatatatcagataagatatggaaaaatccagaacttcagtataaagaatactatgcttcaaatttacaaaaagaatgtttaaaaaaacatggttttagtatagagggattagaaggtatggatacagcatttgtggctagttatggagaaggtagaccagttatagcagttttgggagaatatgatgctttagatggtttgtctcaaaaagtatccactactaaagaacctattgtagatggtggtgcaggtcatggatgtggacataacttacttggtacaggttcaataggagctgtaattgcagtaaaggaattaatcaaactaaaaaagctgaaagggactataaaatactatggatgtccagcagaagaagatttatctggaaaagtattgatgataaaaaaaggtttttttgatggaattgattgtgcttttagttggcatccatttgatataaatactccgataagaatcccaacacttgctaattactctgtgaaatttagatataatgggattagtgctcatgcagcacaagctccttataacggaagaagtgcacttgatgcagtagaacttatgaatataggttgtaattatttgagagaacatatatttgataattgtagagtacactatgtaactactaatggtggaaaaatgccaaatatagttcctgattttgcagaagtgtggtattacataagaggagttaaaatggagcatgtaagagatgtatttggtaggattgttgatatagcaaaaggagcagcattaatgactggtactattatggaatatgacattataagtggagtatatgactatattccaaatacaatattaacagatattctatcacaaaatatgaaattagtaggtgtgcaaaactataatgaagatgactactattttgcagataaattagctgagacagtgtctatagataaaagaagtagtgtttctagtgtattaagtggaaataaggatattactaagatgaatttacatgatgaggttacagatgatacatttactcataataactgtatatcattatcattggatattggagatgttagctacataattcctacagcacaatgttcttgttcagtttggcctattggtatttctgcccatacatggcaatcttgtgccagtgcaggttctgatatgggatttaaggcaatgttattggcatctaaatctatatcatgttcaataaatgatgtaatgcttgatgaattggttataaataaagcaaaaaaagaattgaaggatactgtaggtagttttgaatatactccaattatttgaagagtaatttaatacaagtaagattgaattgtatgaattaggatgaatatataaattaatattatttttaacttaactttctaattattttcaatctaagatacaataattagaatatatttttaaagtttcctatttaaggaaaataatttgattttatgtttgataaaaggacttataatttgtaagcccttttattatatttattttttgtttataattaattttattttttaggtttagttaggttatagattaccctgaaaaataacatttaacttattattaaaaacatgtaagaatagtttataaatattttattttcgatgttgtttattatatccattttatcgatggatgaggaatggctctgccttccctagttacagatgtagtagggaaaccaattgcacaggcatcaaatccatattcacctgttggtactcctaaaatatcacaaaaatctttattatcgctcaatcttcctattacactaacaagttcaaaacctaatcctaaagcagttgatttaagccacatattctgcatcacatgagataatgacttttgttctataggtggtattccacgacgttctgccacaataataagataaggtgctgttcctataccaagaacccctttttcaacttgcatttttaaggaagtaatgaaggattgaagggtaatgttgttctttgccttcttctcattgactgatatttgagttttaataacatcaacaagaatggtttttattttattcatttgtaaactgttatttgaaataacaaagaaatgtctgaaatctgtttgttttgctactgaaagtattgcataaggtgcaagtcttccagtttcaattatttcttcaatcagcccttttgaaggtacttcttttgtaaaacttcttatggatcttctagttcttaatagcatatccaaaacttcattaacattgtttttatctaaattgttcatttttatcctccactaatagtattcttaagatgttctataatgcatccatataaaggcgaacttttcggtcatattaaacatttccttcaaattaagtcgctatttctatgaacacaatgttgattaataatctatatgtatattataatatttatattgcattatgcaataaacaataatatttaaactgttaagtaataaacatttactataaaattgttaattaaaattaaaaaaatttatatggaatgaggaaataattcatgaaaaaagtatctattgatagaagaactatacgtactaaaaaaatgattaggtctgcattagcagagttaatagatgagaaaggatttaacaatatatcagttactgatttaactcaaagggcagatataaatagaggaaccttctatctgcattatgttgataagtatgacttgttagagaggattgaaaatgaaataatacaggaaattgaagaggagaccaaacatcttgattcatccaacatgatggagatagatacctcaagtgaacctcttccatttatggtaaagctttttgaatattttagaaaaaattcagtaattattaaatctatcttgggtcccaaaggtgaccctacttttgaaagaaaaataaaaaaatttattgaaaccaatttgtttgagaaacaaaaactaataaattttaacatagatgaggcaataatttcagaagaatattttatacaatatatactttcagcagacttaggtgtaattcaatattggcttgaaaaaaatatgaaagagtcccctgaagaaatggcactgatacttgctagaatgtcgttactcggtccgttaagagcagtgggaattcgtaaagattcataaaaatagttttatatatattagactttgaaaatatatgtttaaaaaccattttttactactactgtttataaattaggggagatatcttaaaatattagtaaaaggagtgctaagtgagtgtaataactatgagataagaggtttagttgatatagtcaaaacttcaaaagaatcaattagaaaagttaaaatattgcaattaaatttaaaggagtaatatatgaaaaatgaaaatataagttatttggcgttaggattatgttttggtgttgttttgggttcattatttaaaaacttagctattggtttatcctttggattagttattggagtagtattagacagtaagaaaaataaataaaacttcaatagtaacatataacaattatactatttttgtataaaatcattggaaatcaacaatagaaaatatttgttatttaaaaactaaaaatacagtttaaacgacctaaaaatatattatataattattataacaagataagtgagagtaaggttatgataatagagtaatatttttcaattattactctatttatatttatttagttatactatagtttatattgttattttattttcatatgcagtatagggaatggattaccttgttcatcgaactcagattttttaaagactttaaatcccatatgtttataaaagcctaatgcttgttgattttgctcattcacatctacataatttacatttaatacttctattgcatattctacaagtctttttccaattccatttcctatactataattacttacaaataacatttcaattttaaaatcatgtattcccataaaagcttttataatacctttttttgtctcttacacataaaaaattactaacatatttagcacattctttaacttgaggctttattgatattatattttcttcacttaaaaagtcatgtgttgctcttactgatgattcccgtgtatctagtatttctttcatatctttattgttaataatatttaaattttcaatttttatcatttaataattcctcttaagtaagtatgttacttaatattatatgttaaatatgatttaaaaaggttataagaatatttttgtattaaatataatcaaataaatatatttatttgtcataaattaaatgtccactaaaatagaaaaaataagaagaaataggtaataaatgatagcttatagcaaaataaagatgtaagtataacaatagatgagattggaattaagtcactatacctaacagaacattcttaggcgaatatagaagacttaaaaaagaaaagagaagtagacaagaatttattaatgattacatataaaataaatgaattataattttattaatgatataataataattaacaaaaaataaaagaggaacgagttaatgtttgatggcatacactcattttctaaccaataaaacaatagattcaattaaggttactaaagtctaatcaacacataaacatataggataaatacatctttttaatatattaattatgttagacttacaaaaaatgtaaatacatagcttgttaaatcttgattgaaccttaagtaataagggataaaaaatgacttgttcaaaggcaaagaatatactattaaatgatataagtaacttagagataatatgtagtaagtcaaaagaactatatagcatcagtaagtaaaaagcgtaaaaacttacataatgcactataaaataaatgagttagaaaataaatataatttatataataaagtagtacaaaaaggagtatttatgtttggatatgttaaaataaacaaaatggatttaacatttagagaatatgattattacaaagcttactattgtggactatgtaaatacttaaaaagaaatcatggagaaatctctaggttttctttgaattatgatataacatttttaattgttttattaacagcagtatataacccagagtctataagtacagaggaagtgtgtatagtaaatccatttaaaaagaaaaaggtaattacaaatgatattacagaatatgcagcaagtatgaatattcttttaacgtattataaattggaagataatttaatggatgataaacgcataaaagataaattggcatattatatatataaaaacaaattaaaattagcatatgaaaagtatcctgaaaaagcagagtatataaaacaacaactaaatgaattaaataagttagaaaaagataaaaatataaatatagatgaagtatctagtatatttggaaatataatgggtgaagtatttgtctataaaaaagatgaaaatgagagaaacttaagaatgataggttttaatataggtaagtatatatatctactagatgcctatgaagatttagatgaagattttaagaaaggaagatataatccatttatagagtatattgataaaaatgatgagttaaaagaaaaagtaaaaaaaataatagtaacatcattaggatttttagctaggggaattgataatctaaatctaaataaaaatgttggaataatagaaaatataatttattctggtgtttatttaagatatattaatatattagaaagtagaggtggaaagaatgtacagtaatacttataataatgaaaattttatgagagcaagagcattcatagaaaatagtgaatttaaaaaagcatatgattttttaaaaactttgactgacaaatgtgcagagtggtattatttaactggcttttctgcaatgaacataggatattatgaagaaggtgaagacttcttaaaaagagcaaaatttatggagcctgaaaatagtgaatatagtgatgcacttagaagttatacacaatatagaaatgattatagcaatagggctgacaattataatagaagaagacgtaatgatttagatggatgttgttgctgttgctgtgatgattgctgttgttgtctaggtgacgattgttgtgaaaattgtgctaagctttggtgtttagattcatgttgtgaatgttttggtggagatttaataacttgttgttaggatgataaatatgagtataaaagttgcttatggaggagttttattagcattaaatgtgatattgttgactcttacaaatattattcctgtaaatacattgtttattatggggttagcatcacttttagtatcaattgtaataatggaatggggctttaagagtggaatcgctttttatataggttctatagttttaggatttatagtgatggcaagtaagtctcaatggattgtatattcacttacctttggaatatatggtattgtaaaatatcttatagaaaaagataggtctatatatattgagtattttatgaaattagtatttgcaaatataatgatacttatattgtattttttattaagaacaatagtttatattccaataaacatatttattataggttcatttgagatagcctttatagtatatgactatgtttacagttcttttataggttattacaataataggttaagaaagatgctatttaaaaaataatagttgatttttatatttaattttaatgaaattgtagtttggataagtgtaaatgatatatctgaatatacattaaagcataaagctaaatttaatatattcttagtgcaacatataaaagctttgatttttagtcaaagcttttatatgttagatataaatattagatataatataagtttttaaaatagatagtataaattaaatatccactatatttacatctgtagatagagaataaataatatcttttctttctactattatctcaacatttttagaaatttcctcatcaagtgatatttgagataaaagttcctttgttggatttattgctattggatttccaactctttttagcatatttatatcaccattagtatctccataggcatacgagtttgataaatctaaatcatactttacaacaaaatcatttatagcattattcttacttatagaatcccacattggaataactgtgcctgtaaatatattattttcaaagacataatcacttcctagaaaatcggttacattatatttttttgccattttttcaacaagaaatccagggctaccagatataaatataactatgtgtccttgatttagatgccactcaatccttgaacgtgtgtatttataaactctatctgcttttaatttaattacttggtcacttgtaaagttgatacaggttttatctaatccttttagtgaatcaacataaaggtcacatatttctaatagataatcatcataattaccttgtcttttatcccaatccataaaagtgtctctagcatgtttataccaatttttttggtcaattatatcgtatttaattaattttttaaaatgttcaaccataagagagtctctataaagagtaccatctatatcaaaaaaagctgctatatttttcataagaccacctcaattaatcatttccttatattatattataaattgtatctaagttgttaaaatatatgtataataatttatatattaaaaaacaagtattttagagtttaaaggatgtgactatatgaattttaattttgcaaaggctacaaattctagacttatgggcagtttaggtcttataataaattggatagatgatgaaaacaatcacttttgtcaatattttttattagatgcagagggattaggattagcagattatgtgagtttaaataacccaacacaagaagaagcttatatggaagaagaaagattgatgggaggatttggttcagatagagttgaattaacgaaggatgaatctttatttttagtatcttattttggtaataagaatctttattatgataagctattgccaggagataaatgtgagtatattgatattataaaaaactataaaacagatttaattatagaaaaattatacaataaaatatgtaaaagagttgatgaggaagttgaatttataaactatatgactatgagatttatagcatgggatagagaaagtttaaaatatttttctggaagtgacgagattgcaaatatgcatattactaatataaatggaacattacttaaaaacgtggtaagtgataaaggtcaaggcagatatataagtgaagctttatatgaagacaatgatggatattatatatgtaaaattgctttttgcataagtaagtgctatgaaactggttttagaattaattctctattagtgacagataaagaacttatgtatgattttgaggtatttgatgagatttctaaaagtgaatttgtaagtgtttacagtgtaaattcacctgaagaatttgcaggagtattttatagagaaaatccatttctgttaaaaagtaatatgaatgaaggtatattttttactagatttaattttaataatgaccatgtaaaagaaaatgtatatataataaacaatgatatgaaagctatatattacttaatgggaaataagttttttattggtacttataacgaaaatgattgcaattatatcaatgaaataagtcagtctaattatagtgactatattaaatttgaagagaaatttttctttgagcaaaatgcattatatgactttgcagaatcaggttcattagattttgatgattttttggaataataaatttagacattatttaagcgagattaactgaatttaatctcgcttaaatttatttctataatattgggggaatattatgaggaatacatttattattgtggtcaattattaaaattttatacagtttattataaaaaatttatacttttctttatgttgtttgccaatattagtctcaaatacgagtaccatactattctgacccaccaacacaagaaagagttttttaaatgaaaaagtcagataaaattaaattttatctgactttttctatgtttatcttattagattatgttaatatctgttgaccgaataagcgcatactcagtcaactttctatacctataataatattgggggaatattatgaggaatacatttattattatggtcaattattaatgttttatacaacttgctcaaaaaaatatatattacatttcttcctcatcaaattcttcaatattagtagcctgtggtataccttgtatagacatattactagaaccataaggagtaggatatatattaggaggcatagtactaggcataactacaggcataccttgcattgtattatgacatataactcctggtatcatcataagtacattaggaggcatattttgattacatgagaagttaggaatacccatagtattattcatattataccccatattactgttcatgttattaggcacattgttaggcatacccatgttactattcatattattaggcatattgttaggcatacccatgttactattcatattattaggcatattgttaggcatacccatgttactattcatgttattaggcatattgttaggcatacccatattactattcatattgttagacatattgttaggcatacccatgttactattcatgttattaggcatattgttaggcatacccatattactattcatattgttagacatattattaggcatacccgtattattattcatgttattaggcatattatttgtagcagatgtattgtaattcatatttccggatgtattatttgtgttaggcaagttgtttggagaattactacttttaggataatgatttacattattaggatataggttatttatgttctggttattaggtatttttgtataaccattagaaatttgagggtcatttctcaattcatcttggggaatttcttcattagtaatataatctgcatagttcgctgggtctaagtaaggcatgtaactagtatctaaatccttttttttcttgttactcatattaaacttgcacctcctagaaaactataaaaaagtttacaaaaacttattctaataatatatatattaaaaaagtttataatatgtgcattctaattatattaaattaataaaaattattgttgcaaatttaggaatgatagcatataatgaacatatgaacagttattcatatattaaaacaatggaggattaaagatgagagaagagataaatgattgtaattgtaatatagtacatgaagaaatagtaacagaggctaaatcaactatgccagatgaagagatgttatatgatttagcagaattatttaaagtatttggggatactactagagtaaagatattatatgcattatttgcaaatgaaatgtgtgtatgtgatatagcgagtttattaaatatgactcactctgcaatatctcatcaacttagagtactaaagcaggctagattagtaaagtttagaagagaaggaaaaacagtgtattactcattagatgatagtcatataagccagatatttgattgtggattaaatcatattagagaaacttataaatgataaatgagaggagtgaatatatatggaagcaaataatttaattaaaaaagaatttatactaggaggattaaactgtgcacattgtgcagaggagattaataataaagtttctaaactacaagaagttaaatcttccaacttaaattttataaataaaaaacttatagtaaatataaaggaaagctttaatgaggatactactatagaaaagataatagatataatagattcaacagaaccaggtcttgatatacaaataagttctaaagaaaatgcatctagtaaaacatcaattaaaaaagagcttatattaggaggattaaactgtgcacattgtgcagaggagattaataacaaggtttctaaattaaaagaagttgaatcttctaatttaaactttgtaaataaaaaacttacagtaaatataagtaataactttaaagaggatgatgttataaataaaataaaagaaataataaattcaacagagccaggacttgatatacaagtagggtctactgacaaagtaaaagggagaactactgaaaaatcaggagctgtaaatgatacaaataagaaagaattagttccacttataattggagcacttgtatatatatttggtatatatcaaacagctacaggttatgaaagtcagtttagcaatatagtatttatagttgcctatgtaatagtaggtggcgatgtgcttttaagagcaataagaaatatatcaaaaggaagagtatttgatgagaactttttgatggctctagcaacagtaggagcattaacaataggggagtcatcagaagcagtaggggttatgcttttctataaagtaggagagtatttacaaggtgttgcagttggtaaatccagaaagtctataacttcacttatgcaaataagaccagattatgcaaatctaaaatttaattctgaagttaaggtagtgtcaccagaagaagtaaatgtaggggatataatagtagtaaaacctggtgaaaaagtaccattagatggtgtagtagtggatggagtttctatgctagatacttctgcactcacaggagagtcagtgctgagagaagttgaaaaaggagatgaaatcttatcaggtgttataaataaaaatgctttattgagtattgaagttacaaagagttttggagaatcaacagtttctaagattcttgaccttgttgaaaattctagcattaaaaaatcaaagacagaaaactttatatctaagttttcaagatactatactccaatagtagtaatagctgctttattaatagcatttgtgccaccacttgtaatctcaggtgaggtatttagtgattggttatatagaggattgatattcttagtcgtttcttgcccttgtgcattagttttatcaataccacttagtttctttagtggaattgggtttgcatctaaaaatggtatccttattaaaggaagtaactatttagaagctttaagaagtgtagatacagtagtatttgataaaacaggaacacttactaaaggtgtgttcaatgtaactaagttaaatcctgaaggtatatcagaagaagaattattagaatatgcagctattgcggaggtaaattcaaatcatccaatagcaaagtctatattaagttactataataaaaaaattgatttagatacaatagacagttatgaggaaatagcagcttatggaattagagtaaagcataatggcaattttatattagcaggtaatgagaaacttatgaaaaaagaaaatatatcttattcatcagctaaagaagtaggcacagtagtctatattgctgttgataaagtatatagaggttatatagttatatctgatgaagtaaaagaagatagtaaaaatgccataagaagcttaaaagcaataggggtaaaagaagttgtaatgttaactggagataatgagaaagtagcaaaaaatattgctcaagaattagaattggatacagtttactcaaatttacttcctaatgaaaaggtagatagattagaagatttatatgaaggaagaactgaaaaagagaaaatagcatttgtaggtgatggaataaatgatgctccagtattagctcgtgctgatgttggtatagctatgggaggcttaggttcagatgctgctattgaagctgcagatgtagtgcttatgacagatgagcctagcaagatatctaaagcaattgaaatagcaaacaagactaataagatagtgtggcaaaacataatatttgctctaggagtaaaaattatagttatgatactaggtgctggaggagtagctactatgtgggaagctatatttgctgatgtaggtgtggcacttatagcagtagtaaatgctatgagagctatgagataagggataaatgtaaatccatactatttaaaaaacttataattatatattgaagtatgtaataatgaaaggtatcaataagtttcttttaactttattggtacctttttattggagcgctttgcatatataaatttatattcattatccattgtgtttatttaatgtatttatttagtgtagagcttttatattgtaattttaaaatttagacatagaaggtttattaataagtctatattaagtttaaattagattcataaaaattataatacttatgattgtatatatattatattaatagttataatttttacaacaaaatgtgtgtgttaaaatactctaaaccaacagtatgactgtcattcaataaattatgtaatataagaaagtaaatatttttaaaaaataatttaaaaaagtattgacgaaatatttttaaggtgatatagtattacttgtccttaagaaaagggcaaacataaaaaatgaactttgaaaattaaacagtaggttaatttataaaacaagaaacaaaccataaagccagatattttgataacaatagtatctgagcctgataaacttttatttgagagtttgatcctggctcaggatgaacgctggcggcgtgcctaacacatgcaagttgagcgatttacttcggtaaagagcggcggacgggtgagtaacgcgtgggtaacctaccctgtacacacggataacataccgaaaggtatgctaatacgggataatatatttgagaggcatctcttaaatatcaaaggtgagccagtacaggatggacccgcgtctgattagctagttggtaaggtaacggcttaccaaggcgacgatcagtagccgacctgagagggtgatcggccacattggaactgagacacggtccaaactcctacgggaggcagcagtggggaatattgcacaatgggcgaaagcctgatgcagcaacgccgcgtgagtgatgaaggccttcgggtcgtaaaactctgtcctcaaggaagataatgacggtacttgaggaggaagccccggctaactacgtgccagcagccgcggtaatacgtagggggctagcgttatccggatttactgggcgtaaagggtgcgtaggcggtctttcaagtcaggagtgaaaggctacggctcaaccgtagtaagctcttgaaactgggagacttgagtgcaggagaggagagtggaattcctagtgtagcggtgaaatgcgtagatattaggaggaacaccagttgcgaaggcggctctctggactgtaactgacgctgaggcacgaaagcgtggggagcaaacaggattagataccctggtagtccacgctgtaaacgatgagtactaggtgtcgggggttacccccttcggtgccgcagctaacgcattaagtactccgcctgggaagtacgctcgcaagagtgaaactcaaaggaattgacggggacccgcacaagtagcggagcatgtggtttaattcgaagcaacgcgaagaaccttacctaagcttgacatcccaatgacatctccttaatcggagagttcccttcggggacattggtgacaggtggtgcatggttgtcgtcagctcgtgtcgtgagatgttgggttaagtcccgcaacgagcgcaacccttgtctttagttgccatcattaagttgggcactctagagagactgccagggataacctggaggaaggtggggatgacgtcaaatcatcatgccccttatgcttagggctacacacgtgctacaatgggtagtacagagggttgccaagccgtaaggtggagctaatcccttaaagctactctcagttcggattgtaggctgaaactcgcctacatgaagctggagttactagtaatcgcagatcagaatgctgcggtgaatgcgttcccgggtcttgtacacaccgcccgtcacaccacgggagttggagacgcccgaagccgattatctaaccttttggaagaagtcgtcgaaggtggaatcaataactggggtgaagtcgtaacaaggtagccgtatcggaaggtgcggctggatcacctcctttctaaggagaattacctactgtttaattttgagggttcgtttttacgaatactcaaaattagcacttttagcaacgggatttatccgttggcgccgtgctttagcactttgaaaactgcatatatatttagtgatatgacatctaatttgtaatatataaagctgataactttttaaaattatcgaagttgatagcttctaatctatcaaacctttttaactggtcaagttattaagggtgcagggcggatgccttggcactaggagccgatgaaggacgtgataagctgcgataagcttcggggagttgcacgtaaactttgatccgaagatttccgaatgaggaaactcacttagagtaatgtctaagtatcattaagtgaatacatagcttaatgaggggaactcagggaactgaaacatctaagtacctgaaggaagagaaagaaattcgattccgtaagtagcggcgagcgaacgcggattagcccaaaccaataaagttttctttattggggttgcggacatatcataacgaagaggtatcgtaattgaagaggtttggaaagacccaccacagaaggtaatagtcctgtatgttaaacgagaagacttcagatatgatccagagtaccacgggacacgtgaaaccctgtgggaagcaggagggaccaccctccaaggctaaatactacctagtgaccgatagcgtatagtaccgtgagggaaaggtgaaaagaaccccgggaggggagtgaaatagaacctgaaaccctgcacttacaagctgtggaagcacatttcttgtgtgaccgcgtactttttgtagaacgggccaacgagttacgttaagtagcaaggttaagcacttaaggtgcggagccgtagcgaaagcgagttttaactgagcgttcagttacttgacgtagacccgaaaccgggcgacctacccatgagcaggatgaagcgaaagtaaaatttcgtggaggtccgaacccacgagcgttgaaaagctcggggatgacttgtgggtagcggtgaaattccaatcgagcccggagatagctggttctccccgaaatagctttagggctagcctcaaggtgagagatacggaggtagagcactgaatgtcctagggggtattgcacctaccgaagactatcaaactccgaatgccgtcatcttatacttgggagtcagactgtgggtgataagattcatagtcgaaagggcaacagcccagatcgtcagctaaggtccctaaatgtaagttaagtggtaaaggatgtgggattgcacagacaaccaggatgttggcttagaagcagccactcattcaaagagtgcgtaatagctcactggtcgagtgatcctgcgccgaagatttccggggctaaaacttactaccgaagctacggcatcagtaatgatgggtaggggagcttcccatacgggttgaagcatgaccgtaaggacatgtggacagtatgggagtgagaatgttggcatgagtagcgagatgtgggtgagaatcccacaggccgtaaacccaaggtttccaggggaaggttcgtccgccctgggttagtcgggacctaagctgaggccgaaaggcgtaggtgatggacaacaggttgatattcctgtactaccgataaccgtttgagagaagggatgacacagtaggataagctaagcacactgttggttatgtgtgcccaagcattgaggcagtcaaagtaggcaaatccgctttgataatgctgggatgtgatggggagcgaaatttagtagcgaagtagctgatttcacactgtcaagaaaagtctctatcgaggttaaaggtacccgtaccgcaaaccgacacaggtgggtgaggagagtatcctaaggccagcgagagaactgttgttaaggaactcggcaaaatgaccccgtaacttagggataaggggtgccaccatcaggtggccgcagagaataggcccaagcgactgtttaccaaaaacataggtttctgctaagtcgcaagacgatgtataggagctgacgcctgcccggtgctggaaggttaaggggatctgttagagcaatcgaagcagtgaacttaagccccagtaaacggcggccgtaactataacggtcctaaggtagcgaaattccttgtcgggtaagttccgacccgcacgaaaggcgtaacgatttgggcactgtctcaacaacagactcggtgaaattgtaattccggtgaagatgccggatacctgcgacaggacggaaagaccccatggagctttactgtagcttgacattgggtcttggtactacatgtacaggataggtgggaggctttgaaaccaggacgccagttttggcggagccatccttgggataccacccttgtagtactgggactctaaccataggccatgaatctggtcttgggacactgtcaggtgggcagtttgactggggcggtcgcctcccaaaaggtaacggaggcgctcaaaggttctctcagtacggtcggaaatcgtacgtagagtgtaaaggcaaaagagagcttgattgcaagacatacaggtcgagcaaggatgaaaatcggacttagtgatccggtggttctgcgtggaagggccatcgctcaacggataaaagctaccctggggataacaggcttatctcccccaagagtccacatcgacggggaggtttggcacctcgatgtcggctcatcacatcctggggctgtagtaggtcccaagggttgggctgttcgcccattaaagtggtacgcgagctgggttcagaacgtcgtgagacagttcggtccctatccgtcgcaggcgtaggaaatttgagaagacctgtccttagtacgagaggaccgggatggacgtacctctggtgtaccagttgttctgccaagggcatggctgggtagctatgtacggaatggataagcgctgaaagcatctaagcgcgaagccaacttcaagataagatttcccaccgcaagggtaagactccagaaagactatctggttgataggtcgaaggtgtaagtgcagcaatgtatttagcttatcgatactaataggtcgaggacttgaccaatatttatttgatgttcattcattaagatatatgtgtagtttttagagtgctaactctaaagaaactagtattactaggttctataaacttattaaaaacttaatagaaatattaagcataaagattatgtggttacaatagcagagaggatacacctgttcccattccgaacacagaagttaagctctctagcgctgatggtacttggtgggaaactgcctgggagagtaggacgtagccacgtaatctttttttatttattaagtttcttattttaaggtactatttttaaagtatgttataaatgctttgtgtaaatacatataatagtttaaagagattgattctttaaatatagggtgagaatccttagaatatgtacccttaaaacctttaaataagaaaggagatagataagtaagtgtctgtaatcaatagttttattttacaatatggattaatctctgtatttgtattaattatgattgagtatgcttgttttccattacctagcgaagttgttttacctttatgtggagcaattgctgcaagaaatcattttggatttctgacaattttaattttaagtataattgcaggtatacttggttcgatattttgttatacagtgggaaattggggaggtaaatctatcataaataaaataatagagatatgtccaaaggcaaagaaaggaatatttgcatctcaagattattttaataaatactcttctatttctgtttgtgtatgtagattaatccctttatgtagaacatacatatcttttatagcaggtatagcaggtcaaaatattataacttttgtaatatcatctatcgtgggaataaccatatggaatacttcattaatcagtataggatatattttttctgagagttgggtaagaataatgtcacattataatgattataaattcctcgttctaattataccaatatccataatttttattggatttgttattaagtcatttatacataaaaaacatcacaagataagattataaaaaatattagaaaaatttcttttgtacaaggtcattaagacggttgagaaaatagaaggcgtcgtaaatctgcataagcactacgtttttgtaggttctcggcgtttcttttattgcttgtgtctgtggtacttttttcttaaaatgtaccatgttttacactttgttgaggataagtttgcttatatagaagaaaaggcggcagctttgaaaatcaaaactaccactttataaatattcaaaaatatgttgcctctgtgacagtttttttatattcgttcggaagattaaaaccaaatatttaaagttatagtattaaaatacgaaacaataacttgctaatattacattcactataattaacataagttactaatccagtccaatcttatcagtccactcatttattctttctattacccctttaggtgggtcattgttgaatttccattcagtataacagtgtaacatgccaaaaagaaacaagaatacaattagaataatcagtttttttatctttttcattttgatatacctatttcaatttttttcattgtgttttagccctttcagtataaatgcagaaaggcaggcacaaagtaataaacttatgatactccccataattttttctccagtagttatatagtatccagaaatattaaatattgctgcaataggaaaaaaggtttgtaagacatttgacatacccgcaaatagtccagcaatagaataaacttctgtgaatactaatgcaagccaatatccttttttcatgcgcgataccaaggcaataatgggagaaattgcaaagaatacacctatgccatcaagaaaatactctttcatgcaacttaaaaccagttttgtcgataaatcggaaaaatgtaaaacggattcagtcaaaaatgttatagtaaagagtaacaaataaagaagtatactgaatataaaagtaataatcatttttgctatggttaattttgtttcatttatgggaataagacgcagggatttaatagtgtcctcctcttcttcacgacaaataatatagcttcctaatagggcaatgacagcaggaagaacaaaaaaagttgaccaaggttgtaccgcgtccatataccaacctgcattgtctatataccgtgaaccgtcataaacgctctttaagccataatgtaaatctgggtcattatatacatcctgccctcctgcaaaaactatgactgctatcataatggatgcaaaaaatgtaatccaaacaatttttgaacgacgaattttttgacattcagcccaaagtaatttccacattatctacacctcactttcttcttcctagtgcaatgcttgcaaacaatactgatacaatactccaaatacaaatacaaagaaatgctaatgggacattaatttcctgtgaaaatataagacctggaatgtctttatttctcatgataataactcccatactggataatgggtgtaaatacatatttattgtcattataacaaaaccggaaaaggcatataccaatgtgatacaaattgggagaatgtatcctttttgagatgtagcgattgccaaaatcggcaacattacaaaagcagtgattacaccaatttctaaacattttttcaacaaatataaaatgcttgcccagctaaatacgacatatccagaaagtacactaaataacacagaagcaacggctgtaatcagcataaaacaaatagagtaaatcaaaacaacgaaaaatttactaaaaaagtatcccattttactaataggtacaatccaaagctgtttgagcatatcatactggttttcttcgtgtataagcatggtgcaaaatatacccaaaacaacgggcaaaataatccaaagtgtataaccaaatgcagaccatttataaaactttgttggctcaacacctgttttaccaaaataattgaagtatagtagtgcgaaaaacggcataatgagagcagacaacaacatcagccaaataagtttcctacgacgcagtttaagaaattctgtttgaataagtttaagcaatgccctctcctcctgtgatttttttaaagtagtcctctaaagtatcattacaaagttgagaactaataacagttacattctgcattacaagtgctttattgatttcacccatatccagagtagtgttataaaggcgtaaagtgtggtcatcttgaacggaataatccttcgtgttaaattgacgctctaaaataagtgatgtctttggaatatctgaaacttgtagcaggatatatttactgtttttcttttctagttcactcatactactttcttccaaaagaacaccgtggtcgataattccaatatcatcagccaacaatgagatttctgaaagaatatgactggagataagaattgtctttccatgctcaacgctcaagtccctaataaactttctcatctccgcaataccaatagggtcaagtccattggttggctcatctaaaactaacagttccgggtcatgcaggatagcgttggcaataccaagtcgctgtttcatgccaagtgaatatttactaaacagctttttatttttataaggtaagcctacaatctccaatgctctttttacagaattaggggcggctgtaccacgaagttttgcaaaaatctccaagttctccgttcctgtcagattaggataaaatcctggcgtttcgataattgcaccgatacggggatatactcgtttttcacatcccttaatattctctccaaatacatctacctcgccatacgtgattgaagtcaatcctaaaatcattttcataattgtggttttcccagctccgttgcgtcctaacagaccatatattcggcctttttttacatggagattgactttgtcaactactgtttgattcccataaatttttgtaagttgctttgtttcaatcacaaaatcattcatatataatttcctcacttttaataaatttgtttctacaaaagatagttgatacaacgtcaaaatcaactacaattagaattataaaacatgaaccttgccaaaaccttgccataatcttgcttttatcttgttttagagtaagaaagcctcgtacttttacagggctttaggaagcaatattgtaaattctgttcccataccgggagtgctgttggcggtaatatttcccttatgagcgttaataagttcctttgcaatcgccaagcctaaaccatttccctttgaagctcgtgaatggtcgcattggtacaacctttcaaaaatatgtgggagattgtctgaagatatacctttcccattatctgttattataatttgagcttgctctttgttttcaaaaattctcaatgtcattttgttgccactactatgggtaataatattttgtaataggttattaatgatacgggtatatgcatttgcgtctatacgtaagaagtactctatttctggtatatcaaattcatattcaaaatgactgctttctaaaacaggtatccaatcagatataatattacgggataattcattcaagtcaaaaatatcaaaatgaaaaacttgttccttagaatccaattttacccattcaaatagattttctacaaaattctttaagtaatgagccttattagacgcaacatggatatactcgtctttttcctctcctacaacaattttactttctactgcttccaaataaccgaccaaagaagcaagtggagtttttacatcatgggagagacttgtcattagctgtttgtaggcttgttctgattgtttttgctgaataagttgaaattggctattgattgctatttcgttaatatcatagcaaatttgttttgtaatgtcgttttcatctgttaaaatacggcgattaaggtttccattttttatatcctctaaagcatcttttataagtgtaagttgtattcggacacgtagcaggacagaaacaaggtacgctataataatcaggctaagagccaatatcaaaagtagatagacacttgtattcatgttaagcctccttattaaaacgataaccgacaccacgaactgtcaaaatataaaatggatggttggggtctggttcaatcttttttctcaatttactgatgaaagacatgatgttactatcgtcaaaagcatattcttcttcccatacttgtgtataaatctgttttttggtaaatacccgtcccttattagaagccagaaaagcaagtaaatcaaattctttgcttgtaagttgaacaggaatattattgatagaaacaattcggtttgtcttgtcaataatcatgccatttattattatgcaatctgtgtctgttataaaagcagggtttaacatagtataccgacgaataagagaattgacacgagccataagttcgtttatgctgaacggttttgttaggtaatcgtcagcacctaaacgtagtccggaaactttatcatcctcgtcatttttagcagtaagcataattactggaatattacttgtttctctaatttttttcagaacttgaaaaccgtctatatctggcatcattatgtctaaaattacaagagagagtgtgtgtctatttttatcgagcaaatgtagaccttctgcaccacaatgtgcagtaatagcagataaattttcttgctcaacacattttttcataagagcacaaagttctttgtcatcatctataatcaaaacgctattcatattgtacttcctttcttcttttcgctctaccatcaacaggcttttctgcgttctttggtatcagccacatatacccgagttttgaaactcctggtatgcgactttcttcacatagtttttgtactcttctttcagaaatgccccatttttttgctacttctgggcaagacatatattccatatttcaatcatcctttcctcataatttatcagcatatattatatacgtatagacgaacaaaatcaagaaatatcagtaagtagtactcttaattttgtagtgataaaatggtgcatggttttacttaaaatgggggagattaaaaaatcaattttagcttatatccttttatgctaaaatggtgataagaaatgaaacaaatactatttatataaaaggggtaaaaatatggatataatagataatctaagggtgcaaggggtagatgaaaaacttattgaagatgtactgtattttagaaattattatggtttagaaaaagatttagaatacagagtaacaaagtctaaaacttatttttatggtaaagatatcttgtctatgtgtatagcagctattttagaagaagaaaatatattattatcgggaccaaaggcaacgggaaaaaatttacttgctgataatctaggggaaatatttaatagacctcagtggaatacatcatttcatataaatacagacagttcaacacttataggtacagatacatttatagacaatgaagttaaacttagaagaggctcagtttatgagtgtgctattaatggaggttttggagtatttgatgaaattaatatggcaaaaaatgatgctatagttgtggtacattcagctttagactatagaagaataattgatgtacctgggtatgagagagtcaatctacatccagcaacaagatttattgggactatgaattatgaatatgcaggaacaaaagaacttaatgaagcactggtatctagatttatggtaatagatattcctcctatagaagaagataagttaatgatgattttaaaaaatgaattttcagatgctgatgaagaaaaattaatacactttgcaggaatatttttagatttacaattgaagtctcaaaatggagagatatctagtaaagctattgatttacgtggtcttatggcatctcttaagactataagaagaggattaaaaccaactcttgcaattaatatgggacttacaggaaagacttttgatgtatatgagaaagaaatggttggagatgtaattaaaactagaatacctaataaatgggagagtatagatgtatttccaataagtcatatttaatataggtgagattatgaaatggatatatgatgattatgaatttgaaaatagagctaataacttatcatggacaatagctggtgattacaatgaaagtatagatatatcagaaaaagattactcttcaaaagaaataggtctatattttgcaataattgcaggtgctagaagaaagtatgtagattgggatatagttaaaaaatatcttacaaatagaataagaaaaggatacaacaaagatattatactgggtctaattcaagttatattaaatacaatagttgaagaaaaggtcattaaagataggccagggatagaagacataagaagaaatgcttataaagatattgtttcacgttttaccaaaatacacaatgataatattatggataaaattaaatacacatttgtactttataatatggacaagcacccagcattagatagtatgactagaagaatagttaatgatataagaaatatagataccaatcaagatatgatggagattttaaaagcattagatgttatatatttaacttatttcgaatacatattaaatggagaagaaaatagtcttattgatgaaaataatgtagaaagtgtagaagtaaattttgatacatttgctgatttcatgtatgaagaactttatagtgatgaagaagaaaatattattgaaagtgatatagattcaatatcttcatccatgcttgtagaaggtgtaggggattttgatgattctaaatgtagcaattcagcagaccgagttatatatgttgatgaagacactgcaaataagatatattcaaaaatagaacattattatggaaaaacttatttgagtaaaggtgaaattaaaaaaattgagacacaaaattgtagaaatgttcatgaaggttgtagaatacactttacagatggagttcttagaagtgagtgtaataatgtatttcaactaaaatatgtaacaagacaaaaagaaaataatttaggaaaatttagagaacatgctagaatgtatagacagcaaataaagagattaaaagaaagtctgtcaagaattttaatagaagaaaatgctaaaagtagagtatattctgattgtggtactatattagcaaatagagcttggagagttggtagaagtaataataataaaatattttataaagatatagaaaatgaaaaagggaaatacgttattgatatattattggatgcaagtggctctcaaagtagaaatcagggaaatgtggcaattcaagcttacataattgcaaatgctctaacagaagttggcataccaaatagagtgatgggattttctagttttttagactatacaatattaaaaagatttaaagattatgatgatagtataaaaaatagtgaaaatatatttgaatatttttgtgctggtaataatagagatggtttggcaataaaatctatatgtagtggtctaataaatagagatgaagaaaataaaatcctgatagttctcagcgatggaagaccaaatgatgtaaagataggaaaaagtagtgagagaacattaagaggagaaaaggcttataggggtatagttggtttgagagatacagccaatgaagtgagaaaagctagaaagcaaaatatattagtactaggagtatttacaggaaaagaatcagaacttgaagctgaaagattaatatatggaaatgattttatatattcaagagatataactagattttctgatgtagtttcaatgtatttaaagaagataattagaaattaataaacttacaaaaaagaatttatatacataaaaatataaaaatgaataaaatttataaaaaatgtagaaattttcacagaaaaggtatacaatgatttatatagaaaatgatttaagaataatttaaaaattaaatatataatattataggttctttaagcaagattaatagggaaaaaggttaaattcctttacagcccccgctactgtgatgcagacgaaacttttgttagccactatgatgatattttttatatctcatgggaaggaagaggagtaggaagaagctaagtcaggagacctgcctaaaatattaaagtaatttcttcggggatggagaaagtttcttataataattatacagatatgttcattttatgtgtttgtatttggattatcgaaaattagaagcctagccatcgagttaggcttttttatttttatttttaaaataaatcagacatatattatttatattttaattattagaaagggagagaggggatagtaaaatgaaacaaaatatcaaattaggggttatagctgcacttatgttaatcgttttaactccagttacatcgaatgcaatgcacataatggaaggatacttaccagtaaaatggtctatagcatggggagttatatttataccattttttttagtaggactaaaatcaataggaaaaatagtaaagcaagaccctaaaaagaaagtattattagcgctgtgtggagcatttgtatttgtattgtcagcactaaagataccttcagtaacaggaagttgttcacatcctactggagtaggtcttggagcaataatgtttggaccaagtgtaatgtttgttcttggaactatagttctaatattccaagcattactattggcacatggaggaataactactttaggagctaatgctttttcaatggctattataggaccaattatatcattcttaatatttaaagcattaaagaaaaaagacggaaataatgcaatgccagtatttcttgcagcagcaataggagatttggctacatatacagtaacttcgatacagttagcactggctttcccagacccatcaggtggagtgatggcttcagcaattaagtttttaggaattttctttatgactcaaataccaatagcaatagcagagggtattcttactgtaattgtatataatttaattacagaaaatggagaaaaaagcatactagaaaataatgataaaggagttaaagctaatgagtgctaaaacaaagacgaaaactaatatattactacttttattagtagtagctcttatcatattcccattacttgttaattcgggagctgaatatggaggagcagatggtcaagctgagagtgaaattactaagataaatccagattatgaaccatggtttagtagcccatatgagccaccaagtggagaaatagaaagtttattattctctgcacaagcagcgttaggtgctggtgtaatagggtacatattaggtgttcaaaaaggaaagagaagttaattatgcttataattgataaatatgcatatacaaatagattaagtaaagtaaatccaaataaaaaagtagccataggagtaatctttctgattgcttctatggtaataaaaaatatatttgttttaagtggaattatgattttaatgagtattctagttgtttgtgtagctggaatagatttaaagaattatttaaaattactcagaataccaatgtactttttatttcttagtataggaataactcttgtaaatatatcttttaataaggcagacttattatatagttttgaaatttttagtttcaatgtaggaatatcaaaagcatctattgacatgtctattcatgtgttatttagagctatgtcttgtttgacttgtgtatacttttgtatacttacaacaccttttaatcaattaatattcttctttaaaaaaatgcatttgcctgatacttttgttgagctatcaatgttaatatataggtttatattcatatttttagaagaattttcagaaatatataagtcacaagaactaagatttgggtacataaatttaaaaacttcatataaatcattaggaattcttggcagtatgctgtacaaaagacttatgacaaggtatgatgatatgtgtatatcattagacataaaattgtatgatggtaaatttcacatagtaggggataatgatgtttaaaataaataatttaacttatcaatatgaaaagaataccaatgcactattaaatattaatatggatttttcaaagggaaatgttataggtataataggttcaaatggttcaggaaaatcaacattatttatgaatttaatgggtatattaaagcctacatctggagaaattctttttaaagaagaaaagttaaaatatgataagagaagtttatacaaccttagaaaaaatgtaggtattgtgttccaagacccagaaaaacaaattttttattcaaaagtatatgatgatatagcctttgcaatgagaaatattggtatagatgaaaaaataattaaagagagaataaacaaagctctagtagctgttaatggaatagattttatagatagaccagtacattttttaagttatggtcagaaaaaaagggtagcgatagcatcagttatagcaatggaaaatgaaattatattgcttgatgagcctacagctggtttagacccagtaagtactaggtctattgtagatataataaagggattgaataaagataatataaaaatagtaatatccagtcatgatatgaatttaatgtatgaaatatgcgattatatatatgtattggataaggggattttaattgatgaaggaaaggcagaaaatgtatttgtaaatgaaaataacattatacaagctggcctagaatccccatggttagtaaaagtacatagaaatatgaatttacccttatttaagaaagaagaagatttgtataagtattggaaggaaagagaacttaatacaaataaataattaagccctaaacctattttaaaaaaatagatttatatataataacccttaacctagaccccttaaaggtgccttatgattccccaaatcataaggttattttttttattaaacaattaaataaattatatggaaaaatgttatttaattgtaatatattggaaataatctattaatataatacataattataatttgaagtaattcatattttagattaaaatatatttatggctgttaacaggaggagaaatatgaatttagatacattaaatcctgctcaaagagaagcagtagaaaagactgaaggtccagtacttatactggctggtgctggttcaggtaaaactaaggtattaacaacaagaatagcatatcttatagaagataaaggtgtacaagcaccaaatatattagctataacatttacaaacaaagctgcaaatgaaatgagagagagagttgaacaaaatataggtcctgaaactaaggatatgtggataagtacattccattcttgctgtgttcgtatactaagaaaagatataaataagattggttacaatagaagttttgtaatttatgattcagcagaccaagttacattggttaaagactgtctaaaagaattaaatttaagtgataaagtgtttgaaccaaaagcagttataagtgcaatttcaggagcaaaagacaaactttatactccaaagcagtttaaagatatcaacatggcagataatagaatggttaagattgcagatatttatgcgttatatcaagaccgtttaaaaagaaatagtgcacttgactttgatgatttaatacttaaaactgtagaacttttcaaggctaatgatgaagtattagcatattacagaagtagatttagatacataatggtagatgagtaccaagatacaagtaaagctcaatatgaattgataaaattattagcaagagaacatcaaaatatttgtgttgttggagatgatgaccaaagtatttatggatggagaggcgcagatataagaaacatacttgaatttgagaaagattatgacaatgtacatgttgtaaagttagaacaaaattataggtctacacaagtgatattagatgcagctaataaagttatatctaataatatagaaagaaaaagaaaaaagctttggagtgaaaaaaaagaaggagaacttataaagatacaattaactggtagcgaaatagaagaggctgatttcattgctgattcaattgcacaaatagctagaaaagaaaatagaccttataaggattttgcagtactttatagagcaaatgcacaggcaagacctgtagaggacgctttaaatagaagtcaaattccatacaatatatatggtggtacaaaattctacgagagaaaagaaataaaggatttgttggcgtatttaagagttattcaaaatccacaagatgatatatctataaaaaggattataaatgttcctagaagaggtatagggcttagaactatagaaaaaattgaagatagagctaacttaaaacaggaaagtatatactcagtattaattgatatagaaacaaattcagatatatctactaaggcaagggcaagtataagtggatttgttgatattatagggactcttagaactataaaagaagtttatcctgttagcaaacttatagaaaaagtcttggatactacaggatatatggacgagcttgtagagataagaaataaaaatgaaaaagatttaacaggcaaaggtgaagaagctcaagacagaattgataatttgagagaatttatttctatagctttggagtttgaaagtagtaatgatgatacttatgaaaataaagacttagagacattcctaacaagtatagcacttacatctgaatcaaatgatgaagaagacaatgatagggtttcgcttatgacaattcatacatccaaaggtttagagttccctgttgtgtttttaacaggtatggaagaagggttatttcctatatcaagagctataaaatctatgagtgattcacaaatagaagaagagagaagactttgttatgttggtataactagagctaaagaagagctatatatgtcattgacagagaagagaacattatatggtaaaacaaatgttgcaatagcttcaagatttatggaagaactgccagaagaatgtatagaaagattgtacaaagtaaaaaaagaactaagctattctaaagcaagttataatatgttagataaatatactaaaaagtatatgagtactataagcaaatctaaagttgcagataaagttaatgctacaataaaagattctaataaagaaactaatccagatgatataaaacttggttctaaggtacatcatcctaaatttggggttgggacagtggtttctataattggtacagatgttactatagcttttgaccaacagggaattaaaaaaataaataaagaatatacaacactaaatattttataatggaggtaaatgaggaatggatagtataaactttgctaaaaacttaatagacttcatatatgatagtccgtcgtcttttcatgcagtcgagagtactaaggaaatcttagataaaaatggatttgaagaattagttttgaatcaaagatggaatctaagagttggtggaaagtattatgttactaagaatctatcagctatagtagcttttgtagtaaattcagaagatatagaaagagatggatttagaataataggctctcattcagattctcctacatttagtattaaaccaaatgcagaaatagaagctgaaaaatcttatttgaagttaaatacagaatgctatggaggagcaatattaagtacatggttggatagacctcttgggatagctggtagagtagttttaaaaggtgatagtatattaaaaccaaatgaaaggcttatagactttaaaaagccaatttgtataataccaaatctagcaatacatttaaatagaagtataaatgatggtcattcatataataagcaaaaagatatgttacctttagttgggatgttaaatgatacattagaaaaagataattttcttataaagcaaatagcatctaacttagatgtaaatatggaagatattatagattttgatttatttttatatgaatttgaaaaaggaagtttaataggggctaatgatgaatttatatctattgggagacaagataatcttgcaatggtacatgctagtttgaatgctcttgttaatactaaaggtcaacaaggtgtaaatgtaatggctgtatttgacaatgaagaagttggtagctctactaaacaaggtgcagattcaaacatgttgttaaatatattggagagaatttgcatatcaatgggtaaggatagagagggattctttgagtctatttattcatcttttatgatatcatcagatttagctcatgctattcatccaaacattccagaaaagcatgacccaactaataaaccaataatgggaaaaggtccagttataaagataaatgctagtcaggcatatactagtgatggatattctatagctatttataaaaatatatgtagagaagttaatgttgagtatcaagaatttgttaataggtcagatgaaagaggaggaagtactataggtccaatatcttctactcatatagatataccatctgtggatgtgggaagtccaattttagcaatgcactctataagagaattaggaaatgttgaggaccactatagtatatataaaacatttagtaagttttttgaaatataaatataagataaacaatttggagatgagactatgaaattaggattatgtttagaaggtggaggagcaaaaggggcttatcaagcaggagtagttaaagccttgtatgatggaggaataaataaattttattcgatttcagggacatcaataggagcaataaatggatattatttgtacacagggaatgttgataacttggagaaaatgtggacaaatataaaagatatccagaatggaaatgtaaaaatagtaaataatactgtggataattctcctgctatagacaacctaagggaactagatgatagtaatatagaagaaatgaacttttatgttaattatgttgaagttgataataaagtagtatcagaaaagattgttgacatatcaaaaatgcctcgtaatgaagccattatcagcatttcatacagtgggttgttaccatcaaatccaaacgcaactcttggatttaaagaacaatttgtgaaagatgtgcaagaaggaatttatgatggtttcaaattagatggaggtttaattaggagtgcattaattgaaccattaattggggataatgtggataaaattattttaatatccacaaaatataattatgagttgccagaggatattaaaaaagtatatgatgaagataaaataatagtagttagacctaatactcaatttgctcctaaagatacgcttaactttgatgatgagttttgtaaaactatttatcaagaaggatacgaaataggaaaaaatatacttgatagactttaatttagagtataatataataaatgtaattatgtaatttaactaatgaaaaggaaggtaataaattatggaaaataaaaatcctatagtaactatagaaatggaaaatggaaaagaaatcaaaattgagttatatccaaatatagctccaaatacagttaaaaactttgtatcattagtaaatgaaggatattacaatggaataatatttcatagagtaataccaggatttatgatacaaggaggatgcccaaatggtacaggaatgggtggcccaggtcactcaataaaaggtgaatttagtggtaatggatttactaacaatttaaaacatgaaagaggagtcatatcaatggctagaactatggcacctaattcagctggttctcaatttttcataatgcataaaaactcaccacacttagatggtcagtatgcaggttttggtagagtgatagaaggtatggatacagttgatgaaatagcatcagttagaacagattcagctgataagccacaaactccacaaattatgaagtctgttactgtagaaacttttggaatagattactcagatgtagaaaaaaactaaaacttatataaaaactagattgagttataaataaaaattaaaaatatatattacttaaaaatgaggataaagtgaaatgttattatgtttttagacaaatacatttcactttttaatttatttgtattgtggaaagctatatattgtatgattttaactaaaaaataaagttttattaaaaaaattttattatgattgtttatatatttatttttaaataataatgtattaaataaatatataaaatatgtggaaaacacttatttcagtattttttaaacttattttatttattctatttaataaaaataaggttttttataatttttacttataaaaaaatattgttatggtaatatattctatttacaattttataactttggtttacaataatagagacaataaatcctaaaaaacataataagaaaaaagtgcttaatattttagaaagactggtttagtttacaccagctaagccagtcaaggaataatttaaagtgtaatatataataatgaaaaagaacatgctattagaagtttctaatgacatgttctttttttgtagaaatcagcattattatataaaaatttaatactataaattttaattgtattgtaactaagcatgtattttaaacatagtatgatatagacccaaaatggagggattataaatgagaaaaattatactttatttaaatgatgatacttttatatctaaaaaatatccagataaaaactttagtaatttagattattgcttaataggaagtaaatgttcaaatagttttgtaaaagaaaagttgattacttttttttaagtgagaataccagatatattaaaagacaaaagtatattaaaagcagagttatttattcatattgattcaaataagaatcatatttttaaagaaaaagtagatattgaaattaaaagaataagtgaatattataatttacgaactataacatggaatgatagagtgtctatggaaaatatcaggggatatttaccaattgggataagtgatacatccaactatatttgtttaaatattacgggaactataaaagcatgggcaatgaataaatatcctaattatgggttagctttatctttaaattacccttatcagatttttgaatttacatctagtagggattgtaacaaaccgtatatacttgtaacatttgaagatagaattatagataattgttatcctaaatgtgagtgtcttccaattagaattacaggtccaatgggaccaagaggagcgacaggaagtataggaccaatgggagcaacaggtccaacaggagcaacaggcaattcctctcagccaattgctaacttcctcgtaaatgcaccatctccacaaacactaaataatggaaatgctataacaggttggtaaacaataataggaaatagttcaagtataacagtagatgcaaatggtacgtttacagtacaagaaaatggtgtgtattatatatcagtttcagtagcattacaaccaggttcatcaagtataaatcaatattcttttgctatcctattcccaattttaggaggaaaagatttggcagggcttactactgagccaggaggcggaggagtactttctggatattttgctggttttttatttggggggactacttttacaataaataatttttcatctacaacagtagggatacgaaatgggcaatcagcaggaactgcggctactttgacgatatttagaatagctgatactgttatgacttaaaacgtgtctaaaataatcttaaaaactatttaggttttatttaaatgacaaaagtatttttatatattgagttttacctattttagaatgaataaaataacaataataataaaatatattcataaaaattttaaatttatggatttttatttaactttattatcaatatatgtataataaaaaactgtctcaaatatagatttgagacagttttcgttatttaaaaattttatattatttaaaatttttgattgcagtagttaaattagggactaattgtttttttcttgatacaacacctggtgcaaatgtaccttgaacaccttcaacatcaaatgcgttagcaattaagctatcttctgctttatagattaaataagaaccttctttgattatatctgtaaccgcaagaattagtttgtcataatcagtcgaatttatataagataaaaactcatcttttttagcaaatatagagtctatgtctaaggtaaatacttgtccaataccaactctatgtccactcatattaaattctttaaaatccatatttactatttcttctatagtatattcatctaaagaagtaccgcatttaaacatatccatagcgtatttttccatgtctacttttgctattttacttaattcttcacaagctttcttatccatatcagttgttgttggagacttaaataataatgtatctgataatatagcagataaaagaagcccagctatttcataaggtatctcaacattgttttctttgtacatttgataaattatagtactattgcatccaacaggcataactctaaatgacataggaacatcagtagaaataccaccaagtttatgatggtcaattatttcaactatgtttgcttgttcaattccatcagcactttgagcatattcgttatggtcaactaaaacaacattctttttagatgggtttaatagatgaccttttgaaactaaacctaaaaacttattatcatcatctaatattggataagatctgaagtttgtttctagcataatctcttttatttcatccatataatcatcttctttgaatgtaattaaattttctgtagcttctatagagtctaagaaactacattgatttattacattagaagttttataattgtcactttcaacagaaacaacagacactccatttatcttagcaagagctagcaaatcttttgaaatctctgtatgattagtaagtattaaaagtttaacttttgtatcaatagcatattcaatactatcatatctatctccaacaatagctatgtctccttcttttaaagtctctattagagtctccattccaaatgataaagtgactactctaccttttatatcttcaccacagtccacaagaatagtaccattaaggtttttacaaatgtttgatagtgatgtgtgtatagttgtaaagtgttgatgaagtagatttttagctatttctttcatagtaatgataccagcaaaagttccatcatcataagttacaggtagtgttttaacatttttttcatccataaggttataagcctctaatatagatgaagttggtgttaaaggtactactttatcataatttaaatctctaacttgtattctaacattatctaaaatttcaggtgcatctaccttaaagtaatccaaggcatatttagcttcttttctgatatctcctaaagcataagctgttgcttttattcctagtttgttctttaaatgtgctaatgaaattgcagaacatattgaatctgtatctggatttttatgtccgaaaactaataaactcattttaatactcctttcaaaacttgaatataataataattgataaaaatattatatcaaaaggtagtgagtatttgttgtaaaaagaaaaaaatttagtgaaaaaatattatataaaatttatttcttacataaatactacaaatttaatataaaaattattattatatatatttttacccaaccaaacatagaatcaaatttacttttatttaaaataaattgattaaatctacctgggaaaaaattaattaatatgttaataaattaaaaatttataaatattttatactgtaaaaaattttgtatatatattatcattaaaaaattaacggtcttaatataaaaattatttatctatatgaaaagcataattattacatattgacttaaaaataacttatagagattagaataattttagtttgtatattttttaaaaccatacagttgttataaaaagaaaaattgcacacaagtcaaaaataagtgttattttataaaaatacgacaaaaattttatttactacttatacaaataacatgcaaataacatataaaatttaataagtaaaaaaaatgaaagatataaattatcattttagtattttatttagttgaagtaaattattcaaatgaaatatatctcatttagataaaaaattttagtaaaagtaaaaaaaataatatatttgttaaaaaataaattgacaaaatattcagaaaaaaacttcttgacctaagagagtaaaataaataaaatctaaggtatagagatgaaatctataaaattattttaagtataagttaaaaatatagatggtgcatttaagatttataaaaattagagatgcataattattttagggaggtttttagtatggagaaaaaagaaaaggtagtagaaaaatcaaatgttgaagtatgtagtcctgaaattgtcaacagtgttgaaacattaagaatgagattagaagaaattagattggcacaaaaagaatttgcaacatttacgcaagaacaggtagataagattttcttagctgcttcaactgcagctaatcaacaaagaatacctctagcaaaaatggcagtggaagagactggtatgggtattgttgaagataaggttataaaaaaccattttgcctcagaatatatctataatgcttataaagatactaaaacttgtggtgtcatagaaaaagatgaagcatttggttttacaagaattgctgagccagtaggtgttttatcagcagttataccaacaactaatcctacatcaactgcaatattcaaatccctaatagcactaaaaactagaaatggtataattttctctcctcatccaagagctaaaaactgtactatagaagcagctagagttgtacatgatgcggcagttaaggcaggagcaccaaaaggacttataggttgggtagatgttccttcgattgaattaactaatgttgtcatggcagaggcagaccttatattagctactggtggacctggaatggttaaatctgcatactcttcaggtaaaccagctgttggagttgggcctggaaatgtacctgcaataatagatgagagtgcagatataaaaatggctgtaagttcaatcttagtatcaaaatcattcgataatggtatgatatgtgcttccgagcaagctgtaatagtaccagaaaaaatatatgaagaagttaaaaaagaatttaaataccgtggagcacatttcctaaataaagaagaaactgaaaaagtaggaaaagtagtaataattgatggttcattaaatgccagaatagttggacaaccagcacatgtaatagccaaaatggcggatgtagaagttccaaaaacagctagaataataattggtgaagtagaatctgttgaattaaatgaaccttttgcacatgaaaaactttctcctgtacttgcaatgtacaaatctaaaagttttgaagatgcagttgctaaagctgaaaaattagttgcagatggtggatatggccatacatcttcgttatatgcagactctataaatcatccagatagagtagagaagtttgtaaatgctatgaaaacttgtagagtattagttaatactccatcgtcacaaggtggtataggtgacttatataactttaaattagcaccatctcttactcttggttgtggttcttggggtggaaactcagtatctgaaaacgtgggagtgaaacatttacttaatatcaagacagtagctgaaaggagagagaatatgctttggtttagagcaccagaaaaggtttatttcaaaaaaggttgtttaggtgtagcagcaagagaatttaaagatgttatggataaaaagaaagcctttatagtaacagattctttcctttacaataatggatacactaagaagctaactgatttgttggatgagatgggaattaagcatactacattctttgatgttgctccagacccaacattagcttgtgcaagagaaggagctaaggctatggctgatttccaaccagatttaataatagctgtaggtggaggtagcgcaatggatgctggtaagataatgtgggtaatgtatgagcatccagaggtagacttccaagatttggctatgagatttatggatataagaaaaagagtatatgtatttcctaagatgggtgaaaaagcgtattttgctgctatcccaacttcagcaggaactggttcagaagtaactccatttgcagttataactgaccaagattcaggtgtaaagtacccattagcagattatgaattaatgccaaacatggctataattgatgctgatatgatgatggagatgccaccaagattaacagcagcatcaggtgttgatgctttaacacatgcattagaagcatatgtatctatgttaagaactgaaccagctgacggtctagcactacaagcaggtaaaataatatttgaatatctacctcgtgcatacaaaaatggaaagaatgataaagaagcaagagaaaaaatggcaatggcatctactatggcaggaatgtcttttgcaaatgccttcttaggaatatgtcactctttagcacataaattaggtgcattccaccatgttcaacacggtgttgcaaatgcattattaataaatgaagtaattaagttcaattgtgcagaagctccaaataagatgggtgcattctcacaatacagatatcctgattgtatacaaagatatgctgaatttgcttcttttgcaggaatcaagggaaatacagaccaagaaaaagtagataaccttataaaagcaatagatgaattaaaggcaagagtaggacttcctaaaactataaaagaggctggagtagaagaatctaaattcttagaaacattggatgttatggttgaacaagcttttgatgaccaatgtacaggtgctaatcctagatacccattgatgagtgaattaaaagagatatatctaaaagtttattatggtaaataatattcattgtacaacataggttctattgggtttgtatataaattattagatttgaatataaatagagttttattagagaaacgtagaagtaactataaataatagattataacttaaattctgaatggaaatgataaaaagtcagtaatttaatggtaatttcgaatatgtgtatttaatcaattaactttaaaattagtcggaaaatttttttattacatataattttaaagcataatatataaaaaactttatgaaaaaattataaaaatattcagaaaattctattgactaatttatttatcatgatataataaatttagaaaagaaaaaaattggggcctattaaggcccccttactattttttgatagatttatttaaaattactttctcattttgattttttatatttattatagagtcagtataatccacttcaaagttggcaaaagcagagaataaatctatatctcttaacaaatgaattgtcatacattgattgttcttatttatccttagaatcaatgctcttacaaatggaaattgtattctagaattaaataagttagaaccatcagtatctatatctaagctacgataattaatatctataaatatatctacatcatcattttcttctcttattattctgtagtcaaaatctaagtttaaatttaaattatctaaaatcaataacatttaaatcctcttttctataaatagttttagagtgttaatttaagctctccatctattatagatataattctatctgcttttctagcaatattttcattatgtgttattattataagtgtttggttatatttttttatagaactttttagtaaatccatgacttcttccgtagttttactatccaaatttcctgttggttcatctgctaggattatacttggttttgcagataaagcgcgtgcaatagcaaccctttgttgttgaccaccagataattgatttggaagatgatttttcctctcactaagacccaataaatttataatgtcttcgatgtattcttcatcaacttttttattgtctaactttagtggtaattctatattttcttttacatttaatactggaattaggttatactgttgaaaaacaaagcctactttttgtcttctatattttgctaattttttatctgaaaggcaacatatatctttaccatcgacttttatagttccactacttggtctctcaagacctcctactaaatgtagaaatgtgctttttccacttccacttgggccaattatcgcaacaaattcacccttatttatttttaaatttgcatcctttagtgcatgtacagctgtttccttttttccataaatcttacctaagttaagaatctctaatataggcataattaatcctcctattctgtaatgtttatagcttcaactatactaattttatttattttccttaatggaatatatgtagctagaatacctacaattatgtttgctaaaacaactaggatatatattttgtaatctattgaaaatcccaatccatatgatacaaaattatacgtgtaatacattctaaactgtattataagccctaccacaatggtaattacacttgagagtattccatataatattccctcatagagtatcatatttttaaatcctctctcagagataccaatagctcttaacattccaaattcgctagttcttgaagttaagttataacttatgttatttattatattaaacacactaattataaacattactgctactattccataagcataagtcagagccctagctgtcatcttatcaaagttttctttttccattagcatattagctgttgtagttccaggagattcacttcctatttcacctaagagtgtatttatcttttttacatttgcatttttattaatatctacataaactacattatatttatctacaccagttagtttttttagatagtcgttacttgttattacatctataccctgatctccagaatataggtaattatctgcaaaaggataacttacaatagctccaactttaaactcatattctagatattcataattatcttttagttttatataaagatcttgatctatctcaccttttggatatttgacctttatagtatctcctacttttatatctacagcaggcgtttctgtaccaggagtataacttagcttgtatttatttgttttagaaacttgtggtacgtataatatagcgaggttttcttttttcattctttccagatttatactcccactcactaagtatttttctaatgaatttatcatctcatcattgtaacctcttaacttttgtttcattgtatattttccagtattcttattttttatgaatagaggaaaatccttataataaggcgttgaattaataatattgtagtaatctaatccatttaatttatctacttctattcttgtatctaagatgctggcagttttgactttgtcaattccatttatattttttattttatctatctgattatcattaagtccttttatatccttgaaagaatcagctttattagattgatttagttttaagaaaaaatttgttagaataaaatctgcattcatatatgtttcttcttgaccatttttattttgtatatctgaaaaagaatatttataattctcctttatgatcattatacctcctagactcatggataatataattataatgaagccctttttattcctaaagatatttttagcagatatagattttgttactgatatatttaaagttaattttgatatcaaagaattgaccttatttatatttttatcagttccaaaggtttttcttatagagtcaataggagaaattcttcttatctttaaatatgtaaagaaacttataattagtattgtcagtattatacttccaattgataaaagtattattttatctggaataacaaaaggggtaactgttacattaccttcaaattgaatatttcctgcagtcctattaaatatttgtgcaccaccaatacctgtgcatataccgataggtattgctatcaaagcaagtatgaaaagttcataaaacataaacttgaaaatcttgaagttagtggatccaatagctcttaagataccatattcctgtattctttgatatatcgatataacatagatactatatattacaataccagaaaataggctcatagtaattgcagtgtatttacttgagttatctaaagtaccattttccctagtagattctataagcattttgttttttccaacactattctcatccaacatagtattttttactatattatctatgcttgtatttatatcaatgccattattaaattcaatataagcataagaaaatttatccaattttgattcattgagatttaaaaaaatttcacatgtccctttatttttctcaataggtctatcttcaagtattcctacaactttaaatgtctctggtttttctttttgatataatttaaaagtaatgttctgatttatttctggttttaaacccagactatttaaaatccatttctctacgaccacctcattactagcttttggaaggtgaccttttataagtttggattgattagtcaagtaatttttatttgcatattctaggtttatagctaatctttcattaggatctgtatagccatagtgagatgttatacctaaatttttaatatcttttctagactttatgtattctaattgatttttatttatatctttaaagtatacatgatcacttccagtttctctttttaatttatctacctctgcttgttgagcacttcttgagagggtaccaataccaacaataagtgatgtagcaagaattatacttagagcaattgctaaagaccttgctttataacttattatgtatcttagtgctatttttaaattatctttcatatttaccacttcctttcttagctaaatcaattatatgtttatttaaaatatatatcaaagtaagtatcttcaagttttgagtacttaattgtacaaatttatatgtgtatttgcaagtttaattaatgtacatgtaaattttgactttttacataatttttctaaaatgatataatcctcatataaagtgtagatgggaggggaattatggagaataattttatatttcctatagtaatactaactttgtttatatttagtaatcttataatgaataaatacaggttttataaagaattagacatattaaaaagaggaatattaacgttttttgtatcgtgttttgtatggattttattcatggagggtattgagtatatacaattaagtttaggatataattttttacttgaaggagtattaaatattatactttttttaattttaattattttaagcttttatataggatttaaatttataagattactagacaataacaataaacaagagtataagctacaaaaattagacagtaaaataaatcataaggacaatataatcgtaaaattaagaagtcaaaaacatgactatttaaaacatttacaagtagtatattctctattaaatactgggttagctgaagatgcaaaagaatatataacgaatatatcaaatagctttaaatcaaaaaattcaagatatgggaaagtatcttatttagatgctatagcttccttaaaatatgaggaatgtcttgaaaagaacatatcttttgatgtatatatccaagattttatggataatttagagattgaacctaatgatatgagttcagtgctattaaacataatagacaatgcaatagaatctttgtctgctatacaaaaggaaaagaagtatataagattacatgcatatgaagatgaatttcagtatattatagccataaaaaataatggtcctaaaatacataatgtcgaaagtatatttttggatggatttagcactaaagaagggcaagacagaggttttgggttatatctagttaaaaatatactagataagtatgattatagtatacttgtaaatagtgacgattttttaactgaatttgtaattttaataccaaaatattattagttaggaggagagaagtctgtgataaaagttttgatttgtgatgatgataaaattgtaagagatgatatagcaaatatagttaaagagtccggatatgtagattatgttaagaaagtcaaggatggtatagaagcaattgaatttataaaaagtgagaaaatagacttattgattattgacattgatatgccatataaaaatgggattgattctgccaaagaaattctttctatagataaagatatacatatagtttttgtaacaggttttgctgactatagtcttgagagctttaaagtacatcctatagattttatagttaagccgtttaaaaaagaaaaaatacttgattcaattaatatagcaatagaccacattaactctcataaaattgcaaaaaataattttatagaagatactctttttgtatataaaataaggaaacagatacatatgattaattttgatgatatagtcatgtttgagaaaaattcaagagctattaatttatatactagagatgaagatacgataaaattttatgagaactttgatgatttaaaaaaacgcctacctcctaatttctttatgactcatagacaatacatagtaaatttaagacttatacataaggttatacctataaataagtcttctttagagataaaatttataaattttcaagaaagtgctactttaaataaatctttagaaaaagattttctatacagattttatagggttaaaaggttttaatgaagaaaaaaattttcagtgatatacaatatgtatgatgaagatatcatataaatttgctatagttataaattaattcgtataaaatataatataaaacatattggactttcatggaaaattagaaagcccaatatgttttagagataaatcttatatttataagttgcttaagatactagggtctttaatcttattatcttcagcaagtaataagattttagacataatctcagcagtcttagggtcttcatcagcgaatggaaggaatatcttacctctactttgagaatgtacaggaagtatattcaaagcacccatcccttttttatgtacaataccagaacccatatgcacagaatactcacctaaattacctgtgataagaacatgagagccttcaaaattgatattgttaatttttaataataataaaagttctttagcaattgctatacgcatctctacagtagaatggctagtttcagggtcaacaccaccagcatgagcgacacttacaacaaggtctatatcacgcataacttctgagaatagaattggaggtatagaagctaattctaaacttttataagtttttctatcaaaaaattctactgtttcaatagtaggaggctctatatctgctggtgaaaaccaatctgcaagtgcaaacatctttgccactatattttctttataaaatactttctgtaatccctcttcataatcgacagtccaaagctgatttctaagaagtgctacagttttctttggctgaatttggtgaccagcatatctgcgagatatagttttttcagatatttcatcagaatttattctataatactcacggaatacttgcttaaatggttgaacaagttgcttactaaataaatcatgttggaactcactccacttaccagattcaaacaaatgaactggatgtgcaagttttaatttattttttgctgtcaacttataagtttcaccttctatattgcaaataaagaacttagacttatcattataaacatatccaatattatcatcacatacccatactagatttttaatcaaagggcagataactggatttttatagatattggcaatttctttaactgtaaatactatttcatttttcatagcttgttctaaactctgttttgcacgagaatactgactctttaaatctttttggacagatttaagttcaagtacatatggatgtttagcaatagcttttggtatactctttaaagacttgttgcctttttgaactttagtagatgcttttccgctttcatcaacatctatccaaattgaagtaccatcaatatcttttggtttaaatagatgagcaacttcatttagtttttcagtctcaagagcccacatcatacgatttacatctccaaatccagcacttctagctagattttctagcgctatagtacaagcttttgattcactttcacgacgttgtgcaccaaattgcttgctttctttagcaaacttttgaataaattcataacggaaagttgcttcttttaggtctccttttttcataggaagtaaagagaaacttctcaatttatcttgatttctatttgtttcaatttctttcatcaacatgtctttatcaagcttaccaagtgtagcatcagcatagagttgtgcacgtctatgagagttaccaccactagttatatatttagctgacttgtaaagtatattgaatctttcttccccaatagttttatatgaatctaagaaccaatctacatcaaatgcaccatcaatgaaactacgtggtgaaataggggagaatagagcaacctctgattctttttgtgcagagaagccttcatttatatgtgcatggaagtaccaaattgtacttttcagacccttccagtttaaatatttttcaattatgtttacccattgaggggcatacatagcagattctattaatcttaactcagtaatgtcggtatttttaagtaaactttttaatttttttgaatcatcttctttagtaggatagcaatttttaagtagagaacttaaaacatctttttttgaataattgctaccatatgaatatcctctctggaaagtttctttaccaagagcgaccaaaatatttacaaaataatctataccttcaaagtattgtatattattagctagatgagacacttctgttggcatatcacctctacgtgattcaatttctataattcggtttgtaacagtttttaaattatctttaagccaagggtacttttctaatgtgtcaccagcccatctaggatttgttaatgttcttattatatttgatgcgttgtatccacttatcatttctctattaacttgctcttcagtcattaaacctaattcatgtgcacgagcaaacacatttatgctagtatagaaaggaaacttatattctagcaactgataatttgaaaacgtagtgtagaaaaacttagtaaaagaaatatcatcataaataaacgaatgtgctttatcaagccaatagtttaaaataggggcatttaaagcagggcagtattcattttgtctgtaatagtttttagtaaattcaactctttgttttttacattgttctatagtcaataagtttctaagtttatagtatatttctaaacaatagttaaatatttctttatggtcaaactcatttagtaaaactcttaaaagttttcttgtaagtccattaaatttaaatttttcaagttttgtatatattttattttgttttttagagtcaaggacatttgaatatatagatgaaaaccaacttttttctgtttcattatatccacatgtacttatactataaaataagatatcaagtattaatttgtaatctaagtcaagctttttactagtttctctccaaagttctgccaatggataattatcaagagtatcattagaaactttatatttaataggagtcaagttataagtagaataacctaaaagcactttgtctacattacctgaccatctttcaacttcatattcataatctgcattttcagtaataagctcatcaaatttttcataaacttttattattttatttatatccgtatcgagaattttttttgcttctttttttgttgctacagaaacagaatcctcactagtagataaacttatatttgaaataattttattaagctttgatgagctattagaatcatctttaaaatcaaattgttctggaatttgaactttgttttcagggttatatattccaaaaccattttctttgcagtaatcattttttgctttacctaacaaattatcaattaatatttgaacttgagatgtattctttttagatttatcaatatcctctataagtaaaataagcttattatatagttcttgtctatcagaattgtcttttaataagtttacaatttcaagacctccaaggcatttttgagaatttgaagattttatcagtgaagaagcaatattttccaaatttgaatcatcttgttcaagtaaaatttttattactgtttgtctaatagagcttgtctttaaagacaatagattggttatcttatctaattctacatctgttagctcaagctttctaagtaaactcaataccgtttctctattggaaacactcttatcacttaaacattccaataaaaattcacgttgtctatctgtctttggttcatttacaaaattgactataagtgaagctcttaaatctgaactcataagatgacaattttccataagcacatctataaattgagcattcatatcgtatgctgttaaagtcatcatacatttaagtatttcatgagaagaaatttcaatccaagtccatggaaatacacttcctgaaaatgattttgtctttgaatttaaaatttctaaagtatgttttaaactttcaaattgttcttttctagcatcaaagtctttgtcaataggagtgtttgacaagtcaaaattagtttctctgttttgccaactatagtagtagccaacagaaccttctacatagaaatttgtaattacccatgctagtatctctaaatcatcacccttaatgtttttagatgctatagaatgtttaaaatatgtactttctgtatgcgataaaaagtaaagagctacaagttttttatatttttcctgacaagaaagtaagttttcaataagagagtaagagtcatatatgttgtaagttgcagtagcccataaggcaaaataaatttcaagattatcattgctattaattgattctatacggaacttttcatcagtcaatgatttatatgaaagttctaaacatttacgtattattccaggtttttggtctgaaaaaccaagtcctgtccatgtatccaaggctcttataacagaactaaatcgctctaaattgttgtccaaaatagtttttaacatgtatattgatgcagaaattgtaccctcatctaaactctctacaatttgctgtctaagtccttcttgttgtttggctgccaaaagaagtttagaaagcatttcatagcatttatcactatgactcttcatgataccaattatcatttgtcttgtaagtagagcagtttgattttctccaaatattacttcttctaaggcacttgttactttttgatttcctttgtctatttctagtgctattttatcactcattatagagtcatagtacaagaccttatttggaagagtaagataatctataactgaaaaatcataataaattaaatcaacatagtttgaaataaaccttataatacctctaaaataatccacaagtttatttgagcgataccctttacgataatatcctcctgaatatgtataatccatctttcttttaattaattggcaaagttcttctacttgttcagaagtaaatattaattctaatgcattttttaaaggtccagaaaggagctcgtccatatttttaatttcgtagtagtggcaattgtagtatttctttatcatatttaagaatttgtcctcaggttctctataatagtatgaactattttctatgcagtcccaaagagattttgctaagtcgtagtactgttttgaagaagatttagtaaaattatttttaaaattttcaattattttaggatttttttctactctagtacgttctaacatttatgtacctccaaattatttattttaaaacattcttccagcaagcaaggtaagtcttataaaagtaaatatatctccacttttcagatttataggggaatcgagtttttcaataacatcttcatttataagcactttgtagattccatcttcaaatgcctgtaacgctacttctattgccttttctacagattgtttattctcattgtaaatagagccaaatccaacttttccaatatcagcttgagattcaatttcttcattagttaagaagtttattattgatttttctgggattttctcattatattcaagaacatttttagatacaatttcagagatagcttcttttaggcaattgatgttgtcagatacatcaaaaggggtaagttctaacataggtttgcgtttgccaacagccttaactctaaaataaatttgcataaaatcacctcgcaaaatattaattatgtatttagaaatttaaaatttatctatttgttatattatatcattttgtgaattattaatgtgaattatggaattattttacaaaaaatagaaaaaaagctatcttaaagtctaaaaaagcaataaaagataacttttaactataattatatagaattataactgtacatttattaaattttaattttagaattatttttgataactatctttttttatttataaattttgttcctaaatattttttgatatcttcttcaggagaaaagtcatcaataagtatttctttcccagtgtcttcaaatactacaagaacttcacagtcaccttgcaagaaaaattttctaactgtatcttctttaacttctctaacttttattacattctttttttctttttcaaagtcttttgtgtaataacttcccatcatattaattatttttgtatatctattcataaaatacctccatatgcgattaaatttaaaaaatatgttataataattgtttgtattaacttaataattataacaaggagtaataataatgactagtataaaaaataaagatattttaaattgtatagattattccattaaaaataagctctttgacaaactaaatgatgtatataagtccttgccagtaggaaattgttctggatgtggaaattgttgtatggagtcagtaggtataaatttaattgagtttttgaatatattttgttatcttgaagatagagttgatttaaaaaaaagctgtataagtaaaatattagattattattttgaggagtatacaagaaagaacccatgtccatttaaagatactaataatagatgtctaatatatgaagttagaccattaaattgtaggatgtttggacattggaaaaaagaggattataataaaaatttagataatgttattgagaaaaataataactatagagagttaatgaaaaagcaatatggatttgaaataaatgatgaagtagtaaattacaggatagattattgtgatagatttattccaaataaagattatttaagtaaatctaagagattaagcttttttgatgagcttatgatattagactcaaatatttattcaagtggaaatatagatatagactttagggatagaggtatagttgaatattttatagagtcattactttatagaaatttagcatataatgtgaaaataaggatatctaaagaatacaaaataagaaaaagaactatagatagaataaaaagaattgttcttgtatagttttatattagtaagtaataaattgtatcataaatattgtcaaaatgaggtgaggaaggtgaatcttacaaaagtaaaaggaaataccttttttataaaaggtggcacgaatacaggaatatatgtatttgaagataacacagcacttatgatagacccagggttatgtggttcaagacctaggagagtaaataaagtattagatgaaaataatatacaggttagatatattataaatactcatggtcatgatgaccactatggagcttgtaatcaatttaaagaatattataaagatgtgtgtataatgtcatctgaatacgacaaattatatatagaaaatccagaattgttttcaaagtatattgttgggggaaagagcaatgtatttatggataatatcttaaaaaataaaatgttggatgatataaagatagataaatctatagaagttggaaaaattgaattaaacaatgaaatgtttgatataattgagtttcagggtcatacacctggtagtatagctgttttgacgaaggataatgtgatttttgttggcgatttattgataggagatgaaattctatcaaaatacgatttcttgtttctatatgatatacaagaacaaataaattcattagaaaaattaaaaaatatagattttgagtacttagttttagggcatggcaagcaagttatatcgaaagaagattcttataaattaatagaaaaacatttgaatgctttaaaaaaatatttatatcaaataagagagttgcttgtagaaccgaaatctttagaaattttattaaaaaacattataaataacaataatttaagcaataattataaagagtatcatttttttaaatcttcgttagtatctgtcataagttacttagttgatttagaagaaatagggtatatattggaaaatggagaattgctttactatacaaaaacaaaataaattatgataaaataaagaaggtcataaaaaacaaataaagggtgagcaatatggaatacgaaaaatggaatgagatactagcaccttatgaacatgcagtagaggaattgaaaataaaatttaaaaatataagaaaagaatatttagcaaaaggtgaatattctcccatagagtttgtcacaggcagaacaaaaaaaatatcttccataatatctaagttaaaaaggataaatgcaaaagatatagaaactgaaattgatgatattgctggtataagaataatgtgccagtttgttgaggatatatatgctatagttgatttgataaaagtaagaaatgatatgactataataggagaaaaagattatattacaaattacaaagatagtggttatagaagctatcatgttataataaaataccctataaactccattgcgggttcaaaggaaattatatgtgaaatacaaataagaactcttgcaatgaatttctgggctacaatagaacattcattaaaatataaatatgaccattacatacctgagactcttgctgaaaggcttagaagagcatctgatgctgcctttcttttagaccaagaaatgagtgaaataagagaggacataatgaaagctcaggctatgtaccaaatgaagtctatagctattagagatactctaaatagaatacaagagttatatgacttgggtgatacacataaagctatgcagtaccaaagaaaacttgatagaactgaaacagataaaaatataactgaaattttggaattaaaacaagaaatagatatattactagagcaatataaggatactaaggtagatgataaagtagttcagtaaaaaactacttgtagaaaatttgctaaatattaatggggctgcctcttaatggaaaataatttctaaaaagagacagcctatttagtgtaattaagaaaggaatgatattatgagtttgtatgctataggtgatttacatttttcaacatcagtcaataagccaatgaatatctttggaagtaattgggatggtcatgaaaagaaaattatagataattggaaagaagttgttaaggaagaagatatggtcttagtactaggagatacatcttggggaattaatttatcggaagctaaaaaagatttagatataataagcaaacttccaggtcagaaaatacttataaaaggaaatcatgattactggtggacaaccgttacaagtttaaataagctatatgaagacatgcgttttattcagacaaatttttatgaatataaagattatgcaatttgtggaggtaggggctggatatgtcctaatgatgttaaatttgatgagactgatgaaaaagtttataaaagagaagagcatagacttagactatcattagaatctgctcgtaaaagtggtcactcaaaaataattgtgattactcattatcctcctacgaatgataaattggaagaatctttatttacaaagttatttgaagaatataatgttgaaaaggtgatttatggtcacttgcatggtaaagaatcttttaaaatgggattgaaggggattcgaaatggagtagaatatacattagcatcttgtgactatacagaatttaatttaataaaagttcacgattaaaaaacataaattggtaaatactataagatacatgattaaaaataaatatttgagggatttcggttttgagaaaggagacacgacttatgaggtggatattagtttttatatttttatatcttattcctttagtagtgatattcagaaattacaagaattttaagaggtcttgtatctacagtagtatttatgtggtattagctacaacaataatgataagtaatatttatatgagtggacttaataaaataaaagagtctatgtattatcacaattatatttctgatgagacatatgatgaaaagtatgtatcaaattttaaggaaaaagaaagtaccgatttaaaacaggataataaaaagaatgaagaaatatcaaataataaaaatttaaacaacaaacaagatagaaatatacaaaataaagaaagtaatgaagaaggaagtaatgatataaaagaaaagaataattctgatagtaatgtttcagtgaataataaatcagaaaaacaagaagataatacaaaagaaaataataaatatacaagtaaagaaaaaaatagtgaagatataaaaaaaatagatatggaaagtataggaatttttaagaaagaaatttataatatagaaagagcagctttagttccaatgagagaatgtataccttacactaaggatatagcaaaaaatataactaaattatctagtataaaaaaagatgttacaaatgccagaaacaagtgtaaagaagttgtaaaagaatatgaaaatatgcagattccagaactttctaaggagaagtatacagaaacattgagtaatgctagagatgacgtaaagaaagcatatgagcttagagaaaaatctatggaaagtgctttgaaattaataaatactaaaagccctaaatatatagggaagataacagaatatcttgatttatcagataagcagatagaaagttttaaaaatagattgaacgatttaaaagaagaaataaataattcagaaacaaataatattaattaataagatttaaagatataagttaaaagggagattatgatgaataaacagagtataggaaaactaaatatgttttttatggggattactcaaagaaaccttgataataggcatttttttattgagttagaggtgatttttaaatctggaagaaaagagtttaaaggaattgcaatagaggaagataataaatataaatttaattttaaaggaaaatcagatttatatacgtttaatgagttgcttaagaatatttctaaagaggcagaaaattatgatggattagtatttaaatatgttgagcgaggaactattgttgtaattgaaggagacaataagaaggtaaatgtaaaatatttagataataaagaagaagtacctaaaatagatgaatttacggcatctcaaataaaaaacagagattattatgtaaaagtaggacaagcaaatgcacttttaaaagaaattggagtacttacaaaagatggtaagataaaaaatgataaaataagaaaatacaatcagatagaccattttgttgaattgatagatagtattttaaaagaaataaaggataaagactgtataactatcttggattgtgcttgtggaaaatcttacttaagctttgtcttaaatttttatataaaagaagtattgaagaaaaactgttattttataggaatagattattcagatgtagttatagaagcatcaaaaaatatggctaaaaacttgggttataaaaatatgtcatttataaaagaggatttgactaattatacacctaatagggatgttgaccttgtaataagtctacatgcttgtgatacagctacagatatggcaataggtctaggaattagagcaaaatctgaagctatagtagtagtaccatgttgtcataaggagttattagggcaatatagatatgaagctatggaaccaatattaaaacatggtgtatttaaagctagatttgcagatttgataactgatggtttaagaacattgttattggagggcaatggatatgatacttctgtagtagaatacatatctccacttgatacaccaaaaaatttaatgataagagcgataaaaactaaaacgaataatgacaaagcattaaaagaatataaagaactgaaatcacaatttggagtggaaccaaccttagaaaaacttatatattagttaaaaatgtaaaatttacgaaaagcttgcttaaatatgcaagctttttggtattatataggtatagtcatatccagagttttgatttataattaaagctgtgctataatatttgattaatcaaatcaataaatgttacatggaggtaaaaatgaacaaattgaatatatgtattgatatagatggaacaataacaagcccttatcattttcttccatacctaaatgatatctttaataaaaatataactgaagcagagtgtataacacataattgggaagaattgtatggttcgggaataagagatgtgtatgcggagtttaataataagtatatacactcatatgatgaagcaaagattgtagagggtgctacagaggtaattagcacattatctaaaggacataatttatcttttgtaacggctagacatgagtgtttaactgatgtaactaaaaattggctatcgagacaaggattttcagatatagatgtttacttattaggaagtgattataaagttgaaaaggcaagagaactgagttgtgacatatttatagaagataatcctttaaactcagtgcaactagctgatgatggtgttaaagtaatacttctggatactaactataataaagatgttaaacatcaaaatatagttagagttagtaattggatagatattgaaaagattataaaacaaggtatttaaagatttgtagattgaaagggggagcatatgatagatttaaaaattgaaaatagaaaaggaaaaatccatgtaaagagcagtgaaataaaagacattttagaattacgtccagacttcgaatatgtacaagatatatcaaatactataaatcaagaaaatatattggtatttgattgccagttgacaggaaattcttttgatatggatgatttagatatagaagaaatattggaagagttaggtgaagaaatagatgagtcttatttcagtgttttatttgaagatgtaagagcgtatttaaaagatgctactgatgagatagaagcagacttacaagataattacttatttgataatttgagatgttattttgatatatacaatataaatcaagaatttacagattttaagtttgtatttttagtttcttttaaagatataaaaatttcttcattagcaaacctagctaagattgtttctaagagacagcttataggtgcatctaagttttatagttaaaatgaaatattattataataaaagctagtagccttgtaaaaatataggttactagttttttatttgttcactttcacaaaatttcagaaaactatttacattctaaaaaaagtaatgtatattaaacataatgtacagtataatggataaaaagtttctattaaattactaagtttatttaataatcaaaataatttatcttatattagtatgtattagggggtatttatgcaaagtttaaatgaaataatcgctgaaaatttaaaaaagataaggaaagaaaaacatcttagtttagacaagattgcacaacttagtggtgtaagtaagagtatgctatctcaaattgaaaagtgtgaggtaaatcctactatatctactttgaagaaaataactaatggactaaaaatctcatttacatcattgatggagaggcaggaaagtgacatagaattgattcaaaaaagtgatatagaccattttattgaagataatggaaagtatataagttatccaatatttccatttgactccaaaagaagatttgagatatttatgattgaaatagaagaaggtggaaatttagattcaaatgctgaacttccaggaacacaagagtttataactgtttttagtggcgaagtaaccattaaaataaatggagaagattacattgtatctagtggaaattctataagatttaaagctgatgtatcacatatatatagaaactcaggcaaaggtatagctaaaatgagtatggtagtatattatatataaataatttaatggaattagagtgatatttagatgattttaggtatgaagatatattatatttaagttataggagtgtgatttatggatgaataataaaaaagcagtttttttcttttgtagtgatttaaagaaagacccagtagccagtaatgtgataaagtgttgtgaagaaataatggatttaaatcaaactgatattgttattgatgataattttgtattagaatttaaggataaaaacaataacttatttcattttgtaaaaacaaaagatgtaataagtcataattataaatattatcttccaattttaaatagacatttcagagattatgattttgcaggagttgtaaattggcatgagggagaaaatgctccagaacatatcctaacagctcatacaattggagatgttccaacaggagaatttggaaattcaaatccaagatactttaaaaatctaatcaatgctattgaggatataaaaaatgaaaatctacttgatgaatttactacattaacagaagcaactcactggtctggaacaacatatggtgaagaatctaaattaattacagaatattctgtacctatgttggatattgagataggaagtagtagtgatagttttaataatagtatagcaatacaggtattggcaaaatcattaattagagtatttgattgtgatgaacctttgaagactttattatgtgttggaggggtacattttgagaaatctttctcagatattataaaaaataaagaatataacatatcaattggacatgtattgccaaatcaatggattgtaagtggaatgtatgatgatgaatcgggatttgagaaactagaaaagtgtataaatagtattgaaggtggaattgattgtatagtttttcatgataaattaaaaggtacctataaagagcaatgccgtaaactaggtgaaaaacttaatgtacctgtatttaaacataaaatattaaaaaatcccaaagacttacctatatggtagtcttatacagttaatataacaataagtcggattaatttttaagcgaggtcaaaaatgatattatcttattttgcattattaattagagtagtgctattagcttttgaaagagtagttgtaagattattaggtgatgaagaaggagatatttataaaaatatagcttcatcatttctatttttctttatagggggagtatgtttacttccatttagcataatggatagagttagtgattggtcgtttttaataccatgttatataagtagtttagtctattcaattggttcagtagcgtatgtaacgtctttagcaactggggaagtttcacttgttactccaataaatagtttaaattcattgtttttactgcttttatcagttatatttttaggtgaaggtttaagtttagcaaaagttgcaggaatcataattatgattggtggagtgtttatattaaaaaaagtaagctcttttttaaagaatgtctctgtaatttttaacaatttaccatgtagattaatgtttttatacatatttttgcagtcagtaggaagagtattggataaggctttttttgtacaagtatctcctatattatattcaactatactgtattttttcgtaggtttaaatttatttatctttttagcatttaaaaagaaacaaaaaataatttgtgagatttttagtaataaaaaggggctttcaattttaagtggtgctattaatggatattcttatttagcattattaattgctttaaataatctagaacttagtatagcagagccattttctcaagtatctatgataataactttaatacttgctcattttatattcaaagaaaatataaaagaaaaaataccaggttcaattttgatactaattggtgggtggctactgttactttaattgacataaaaaatgaattataaaggtgctattagttagtatcagaaaatttaaaaaagtattgacaattcttttaggcaaatgttaatataataatacaaaatagtataaatagaagacatgttactggtaatgcaggcaggatcgaatatattgctttgatttttcaaggtgtttatataggttctgccttttttgcatcttgaatggccattcataaaaaattatggagaaggagattacaagatgaattataaaaaaactgccattgacattattgaacaagttggtggttcaaaaaatattttagctttagaacactgttcaactagactacgctttaagttgattgatagaagtaaagtcaatcaggatgctttaaaaaaagtacaaggtgttatgagtatagttaatggggcacaatttcaagttgtcattggaaatagtgttgttgatgtgtatgatgaaattttaaaagtttgccctttagatacaaatgatagtactgtaaaaactgaagaaaaaataaacttaggaacaagatttatagaatttattattaatatttttcaaccactgatttttgctattgcaggagctggtattttaaaatcactgttgatgttattagcaatgtttaatattttaaaatcagattctactatatatacattattagttgctatttcagatgcaacattctatttcctacctcttatggtagctgtaactactgccaatgtattgaaatgtaatcgtttagtagctattgccgctgtaggatacttattgcttccagcaacaacaactgctttaagtgaaggtgtcgaactatttggatttacaattccaaacattgcctataatgcacaagttttcccggctatcttatgtgtgtcttttttggcaacaatggagaaaatttttaacaagtattcaccaaaaccaattcgaactttctttgttcctatgatgtctttggcaattactgttccaattactctaactattttaggtcctttaggatataacgttggtacaatttttacaaccattattttattcttatataacaaaatgggattcttagttgtaggattacttgctgcttttcttccatttatggttgcaacaggaatgcacaaagcactaataccttattcaattaatacaattggaaagttgggttatgaagctttatatatgacatcttcattagcccacaatatttctgaaagtggtgcttgttttgcagtagccttgcgaacaaaagatgaaacattaaaacaaacagcattatctgcaggaatttctgccttgatgggaattacagagccagctttatatggtattactttacaacataaaagagcaatgttaggtgttgtattctcaagtgcaatttctggtacatttttaggattatttgcagtaaaaggatttgtaattgttggaccagggcttgccagtatgagtatgtttattgacccaaacaatggaaacaatttgatttttgcgagtattggttttgttattgcaatattaggctcgtttattattacactgattatttggaaggaagatacaaatacagtagagtcatcaattggagatgttgttgaagaagagctagaagaagaaaaagaagtaaatatcttagtaactccagtagaaggaaaagtaatagatttaagtaaggttaatgatgaactatttgcaagtaagactttgggagatggagttgcaattataccgaccaatggaaatttatacgcaccttgtgattcagaagttgtgatgttatttgaaacaaaacatgcaattggtttaagaacaaaaaatggggctgagattttgattcatattggaataaatactgtaagtatgaatggagatggatttaaaacatttgttaagacaggcgataatgtaaaagaaggagatttattaattcaatttgatttagacaaaatctcacatgctaatttagattcaactgttatgattgtaaacaataatggagcagattatgcttataaagtgttaaaccagtcttatggcaatgtaaaaaaaggaagtatcttgtttgatgtaaagggaggaatataaatatgagaaagtttccagaaggatttctttggggaggagctacagctgctaatcaatttgaaggtggttggaatttaggtggtaaagggtggtctgtatcagatgtagcaaaggcacactttgatgcagatgtgaaagactataaatctaataatgaaatcacaacaaaagatatagaagaaggattagcacatcctgaagatgaagtaaattatccaaaacgtcatggtagtgatttttatcatcactataaagaagatattgctctaatggcagaaatgggatttaagacatatcgaatgagtattgcttggtctcgtatttttccaaatggagatgataaagagccaaatgaagaaggtttacagttttatgatgatgtatttgatgagttgataagttatggaattgaaccacttgttactatgtcacattatgaaccaccattaaatatcgttttaaactatgatggatggtattcacgacaagttatcaatatgtttgttaggtatgtagaaactatctgtgaaagatataaaaacaaagtgaaatattggcttacatttaatgaagttgattctatgattcgtcatccgtacactactggtggtttagttcgagaccgttttaaggataaaaactttgaggaagttatttttcaagctatgcatcatcaatttgtagctagtgcccttgcaacaaaaatttgccatgagattattccaaattcaaaagtagggtgtatgttaacaaaattaacgtattatccatatacatgtagaccagaagatgttttggcaactcaacaaaaaatgagaagtatttatgcatatagtgatacgcaggtttttggtgagtatccagtatatttactttcgtattttaaaaataataacattcaaatagcaaaagaagaacatgatgatgaaattatgaaaaagtatccagtagattttatttcattctcttactatatgtcttcttgtgaggcagctgatacaactggattagatattacacctgggaatacgttattagctgtaaaaaatccttatttagaaatgagtgaatggggttggcaaattgattcaataggtctacgtatatctttgattgaattatatgatagatacagaaagcctttatttatagttgaaaatggattgggagctaaagatattttaactgaagataaaaaagttcatgaccaatatagaattaattatttaaaagaacactttaaatgtatgttagatgcgattatcgaagatggcgttgaactttggggatacacttcatggggttgtattgatttggtcagtgaatcaacgaaacaaatgtcaaaacgttatggatatatttatgtggatgctgatgattatggaaaggggacatataatcgatataagaaagatagtttttattggtataaaaaagtaattgaaaataatagtatagattttaaatgaccaatagaaggtgagcaaataaaatgaactacataataaagaaagttttgaactcgagcgttgttttagttcatgatgcaaagtataatgaatttattttgctagggaaaggaattggatatggtaaaaaaacaggagaatatatttgtggttccaatgataatcaaatgtttgtccctgttgaaaatacaaaatcaaaaaaatttttagaattaatggatgatattcctgtcgacattttaaagataacacaggaaataatagtagaggcagaaaagttattgaactcatcttttaataaaaacttatacttaatattagcagaccattttaactttgcaattgaaaggatgcgtaaaggaataaaaattacaaatcgagtattttgggaaataaaaaattattatccaaatgagtttaaggttggaatggttgcaatttatatggtagaggagagattgggcattcaattaccagaggaagaagcagctaacattgctttccattttgcaaatgctatggcttcagatggaaattcatatgatacgattaagtatgccaaagtaattggagaaataattaatatttttgttttttctttgaatagaaccttagataaaaagagtatgcattatatgagatttataacacatataaaattttttgtggaaagatttttttcagatagtatgttaagcagtggtgatgatttattatttaatcaaatgaaaaggtcaaatccaaaagaaatgttaattgcattaaaagttagagattttttagaaaagaaatatggaaaaaagttaacaaatgaggaaatagctttcttggttgtccatatcgcacgagttaagcaatagagtgaattactaatattatcttatacgtctacatggtagaaaattgaaagaaggtaaagtatataaagaaactgagacatattattttgttgttcattatgtttattttatgagtgtatcctgttaaaaatttaagttaatatttataattaaaatatacaaatagttaaaataagtttatgtggttatgaatttattttaactatttttttgtttaatggaaaatatgttttataactagaattttatttttaattaattataatacaaaaaactttataaaatcttcagaatttcttaaagaatatgtaagtaacataagatatattatatttagttggtaatataaagggggcaatatttatgaagaataaaaaattcaatgttataacactgataatacttgataatcatatttatgccattaataaagagcagattagtactaattcaaaaagaatttactttgaaaaaagtcgatttttcagtgattataagtgaataaatatatataaacatttaataaatttagaagttaaatgttttaatacgaaaggatacacatatgataaatttagaagaaaagtatttaacacgaaaagacacatatatgataaaaattctagaatacaatggacatattcgaaactggaaagttctctgtgaagaacttggaatcgattcttcattatgtagagatgagcgtgaacgagcaattttagtggaagcatataagacatggggatatgatatggcaaatcacatgcatggaatgtttgcctttgcattatgggatactgtggaaaagaaactcttctgcctaagagaccagtttggagtaaaacctttctattattatgagactgaaaatgggaagcttctctatggttcatctattcgtaagattatggagcaaccaggatttgtgaaagagttaaatgaagacatgttacagatttatatgtctttcacatatgtagcaggtgaaaatacattcttccgtggagtaaagaagcttatgccaggacattaccttgtctatcagaataaaacagtatgtattggtcgttattggaaacctgaatttcatcctgaccacagcaagtctattgaggaatggacggatgaaattcatacaacacttcagaaaattatgccagaggtaaaatcagagaatgaaactgcagagttattcttatcaggaggtgttgattcatcttatatattggcaatgtcagatatagaaaaaacaggttcatgtggttatgaggaagagcgttttgatgaatcaaaattagcacaacagacagctaatattcttgggtgtaaaaattcgagatatataattacacctgaagagtattttgcgtcagtaccttatgtaatgtaccatatggagcaaccaactggagatgcatctgctatcgtttttgctattggatgcaaggcagcagctgaaaacacaaatatctgttactctggagaaggagcagatgagttttttggtggatataatatataccataaggcagagtgttatggagagaatttgaagacattttatattggaaatacaaacattatgaatgagggtgagaaaagaaaaattcttaagaaatacaatcctgatgtgcttcctattgaagtggtaaaaggaatttatgaagaaacagaagaactagatacacttactaacatgtcaaatgtagatattcaaatatggttggaaggagatatttattttaatatagataaaatgagtactgcagttggattggaagtcagaatgcctcttacagatacaagaatatttgatattgcatccagaataccatcagaatataaagtgaaaggaaaagagaataaaattgcctttcgtacagctgcatcaaaaacattaccagaagagattgcttttagaaataaattaggatttattgtgccaattcgtatatggatggctgatgaccaatataataaggatatccgagataaattcaatagtgagatagcagataaattctttaacatagatgagattaatgagatttttaatgactacattagtggaaactctgataattggagaaagatttggatgatttacacattcctagtgtggtatgaaatctattttgtaaaatgttaatacaagaggaagaatcacctgaaagaccattcaggtgattcttaatgttttataattttacttgctaattcttatgtctaactcttaatggtatatcaagtttttttgccagttgtttagattcttctatttcttctggagatatttcatctactactgaaaaagctacttcttttatatattttttgcaatctcttgcaaaacctaacatatagtcaaatgatttttctccaaactttggttgagtaactctattataagcttctttatttggggcattaagacttattgatactgtatctataacatcttttaacagaatagctgtttttttgttatgtattaaatcacttagaccatttgtatttattcttatttttatgctacttttttcttttataaactttgctacctctatcaattcatttattctcattaatggttcgccatatccacaaaatacgatttcatcatagtcgtctaaattgtatttattgaaggcttcttttacttcatctacacttggctcatgctccaaccataaactaccactatttgcaacttcatctttttcgtttcttatacaaaaaacacaactacatggacatgtattagttatatttacatagatactattttcaattgtatataagatattcataattttccctccataaatttaaattcttaattaaaataacgttttttaaaatcaagtttatcaagtgccatacctaagattataaaaacaataaaacttcctattggctgtaataagccaagtaagctcattacaaatgcacttgtaaaacttccaataattataccttcagcaaacatgtataaaactaatcctactatacctgctacaaccgaagcaactatatttctcttatttattatcttgtcacttttagaagtgaaaaataatacaagtattggttttatgattatagttggtattacccagatagcagcacctgtagataaatcagctagaccagcaccaattgcagaagcagctatagcatagtttgttggcaaaatagttgcagctagataaataaaagcatctcctatatgaacatatccattgtttccaccaactggaatatgtaatatatatgctattgtcaggcatattatggatgcaaataatgctgaagtaacaatataggtagtttttttagaagtaactttattcattttttccaatatactccctccctaaaaatccagagctaacataattgttatgttttcttataaatatattaatattaatcatacaattttcatagtttgttaggtgttttttttgtaaaatacagattgtacccattcaaatgtatataattagaaaagtaaaaataggtaaaatgtatagagtaggagtagttagagtaagttaatataaatttaatttggtataaataagaggagtacaagtttaatataaaaaataatataagagagtctactcaatatatactgagctgactctcttatatttgggaaattaaaggctattttgttagataatagctaattaatgaaaaaatatatttataaaatactaatttactctattagtagcagttcctgtttttataacttctacagcactacttaaactagaataaactatattttcaatcgctgtactagtgaagaaaccaaggtgatgagtgaatataacttgttccatagaaagaagtttatttatttctgggtcagttaattctccaggattcatttttttgtttaagaacaatccttcagtttcaaatgtatcaagggcagcagctctaatttttcctgactctagtgcttctattaaatcccctgtattaattaaaccaccacggccagtatttactatgtaagctccatccttcattatagctagagtatctttatttatcatatgttttgttccttcaagtaaaggagtatgtaatgttataaggtcagcttcttttagaaggtcttctaaagaatctttgtaagttaatatatcatttaaatcactatttggatattggtcaaatgcaattacattagctcctaggcctttgaataattttgcagaagtagcacctatttttcctgtacctataacaccaactgtaatagatctaacttctgttccaagaagttcagctatccaacggtaatcaccttcacagacttttttctttactagaggagtctttcttaaaaggttcatagcttgagtaacagctaattcagctattgcattaggtgaataagaaggaacgtttgtaacgataagtccattttcattaactaaatcaaaatgtatcatgtcaacccctgcagttcttgaagctataactttaaccccagcatcttttaaagtttcataaatataaggattatctatatagttagtttgttgtatagatataccatcataccctttagctttaactacattttcttcagtcatgttttcaggataaatatccacttgaacatccttatgttcttcagaccatttttttattactggttcttcataatcgcgtgctccaaatactagtattttcatatcaataccctcctgtaattattaaattattatggtaatttttcatttagaaataatatgtagcatataaggttatattttttatacaaaatttttaaggttaaaaatttagttttgaaattgttttccctgtgttattttgatatttagtaattttttatttaatgtaataattactctaaaatttatcaaagaaattgttattttttagattaaatattattaaaaaattatctaagtttgaaattagttaactaacttgctgattaattacaatgataacatgtgtttttgagtttagcaatgaaaactttttttgaaatgtcaagctttttcataaaaaaatatataaaaaaaacttttataagcatagaaagaatagcaaaatgcaatggatagtggcaagatgccacgatatgaaaaagattattcaattgcatattgttaaaaaacattcaaatcaagcgatattttgattaaatataaagttggcacgataaatgcttaacaatataggtgtaagacaataaaacaataaaaaataattttaataatttttaagttattttagataagattaggaactttgacatcagacagttaatatcagaaaaaagtattttatgagtgatttaatcgaaattttataattgatactattaaggaggaaaacgttatgcttttagaaggagttaaagtagtagaactttcaagtttcatcgcagcaccatgttgtgcaaaaatgttaggtgactggggtgcagaggttattaagattgaacctatagaaggtgatggaataagagttatgggtggaacatttaaatctccagcatcagatgatgaaaaccctatgtttgaattagaaaatggaaataaaaagggtgtaagtattaatgtaaaatcaaaagaaggagtagaaatattacataaattattatcagaagcagacatatttgtaactaatgttagagttcaagcattagaaaaaatgggtatagcttatgaccaaataaaagataagtatccaggattaatattctctcaaatattaggatatggtgaaaaaggacctttaaaagataaaccaggatttgactatactgcatacttcgcaagaggaggagttagccaatctgttatggaaaaaggaacatctccagcaaatacagcagcaggatttggtgaccactatgcaggtctagcactagcagcaggaagtttagcagcattacataaaaaagctcaaactggtaaaggtgagagagtaacagtaagtcttttccatacagctatatatggaatgggaacaatgataacaacagcacaatacggaaatgaaatgcctttatcaagagaaaatccaaacagcccattaatgactacatataaatgtaaagatggaagatggattcaattagctttaatacaatacaacaagtggttaggcaaattctgtaaggttataaatagagaatatatattagaagatgatagatataataacatagattcaatggttaatcatgttgaagatttagttaagatagttggagaagctatgttagaaaaaacattagacgagtggtcagctttattagaagaagcagacttaccatttgaaaaaattcaaagctgtgaagatttattagatgacgaacaagcttgggcaaatgacttcttatttaagaaaacatacgatagcggaaatacaggtgtcttagttaatactccagttatgtttagaaatgaaggaattaaagaatatacaccagcaccaaaagtaggtcaacatactgtagaagtattaaaatctttaggctacgatgaagagaaaataaataactttaaagatagtaaagttgtaagatattaattagtaattctagattttttaaaaggagaatgctaaagatgtacacaatgggattagatataggttcaactgcatcaaagggagtaatcttaaagaatggggaagatattgtagcttctgaaacaatatcctctggtactgggactactggaccatcaagagttttagaaaaattatatggcaagacaggtcttgcaagagaagatattaaaaaagttgtagttacaggatatggaagaatgaactattcagatgctgataagcaaataagtgaattaagctgtcatgctagaggggtaaatttcataattccagagacaagaaccattattgacataggtggtcaagatgcaaaggtattaaaattagataataatggaagactattaaactttcttatgaatgacaaatgtgctgcaggtacaggaagatttttagatgtaatggcaaaaataatagaggttgatgtatctgaactcggaagtatatctatgaattctcaaaatgaagtatcaataagcagtacatgtacagtatttgcagagtctgaggttatatcacatttatctgaaaatgcaaaaattgaagatatagtggcaggtattcatacttcagtagcaaagagagtttctagcctagtaaaaagaataggagtacaaagaaatgtagttatggttggtggagttgctagaaatagtggtattgtaagagctatggcaagagaaatcaacacagaaattattgtacctgatatacctcaattaactggtgctttaggagcagcgttatatgcttttgatgaagcaaaagaatcacaaaaagaagtgaaaaatatataaaaagagggatgaaaatgtctgaaaaaaaagaagctagagtagtaattaatgatttattagctgaacaatatgcaaatgcatttaaagctaaagaagaaggaagacctgtaggttggtcaacatcagtatttcctcaagagttagcagaagtatttgacttaaacgtattatatccagaaaaccaagcagctggagtagcagctaaaaaaggttctttagaattatgtgaaatagctgaatctaaaggatattctattgacctatgtgcatatgcaagaacaaattttggtcttttagaaaatggtggatgtgaagctttggatatgccagctccagatttcctactttgctgtaacaatatatgtaatcaagttataaaatggtatgaaaatatttcaagagaattagatatacctttaataatgattgatacaactttcaataatgaagacgaagttactcaatcaagaatagattatattaaagctcaatttgaagaagctataaaacaactagaaattatatcaggaaagaaatttgaccctaagaagtttgaagaagtaatgaaaatatcagctgaaaacggaagactatggaagtattctatgagtttaccagcagattcttctccttctccaatgaatggatttgacttatttacttacatggctgtaatagtttgtgctagaggtaaaaaagaaactacagaagcatttaagttacttatagaagaattagaagacaacatgaaaactggtaaatcttctttcagaggggaagaaaaatacagaataatgatggaaggtataccttgttggccatatataggatacaagatgaaaacattagctaaatttggagttaacatgacaggtagtgtttacccacatgcttgggcattacaatatgaagttaatgatttagatggaatggcagtagcatatagtactatgtttaacaatgtaaacctagaccgtatgacaaaatatagagttgattctttagtagagggtaaatgtgatggagcattctatcatatgaacagaagctgtaaacttatgagtttaatacaatatgaaatgcaaagaagagcagctgaagaaactggattaccatatgctggatttgatggtgaccaagcagaccctagagctttcactaatgctcaatttgaaacaagaattcaaggtttagttgaagtaatggaagaaagaaaaaaacttaatagaggtgagatataatggaagctattttatctaaaatgaaagaagtagttgaaaatccaaatgcggctgtaaaaaaatataaaaatgaaactggtaaaaaagctataggttgtttcccagtttattgcccagaagaaattatacatgcagctggaatgcttccagttggtatatggggaggacaaacagaattagatttagctaaacaatatttccctgcatttgcatgttcaataatgcaatcatgtttagaatatggattaaaaggtgcttatgatgaattatctggagttattataccaggtatgtgtgatacactaatttgtttaggacaaaactggaaatcagcagtacctcatataaaatatatatcattagtacacccacaaaatagaaaacttgaagctggtgtaaaatacttaatcagtgagtacaaaggtgtaaaaagagaacttgaagaaatttgtggatatgaaatagaagaagcaaaaattcatgaaagtatagaagtttacaatgaacatagaaaaactatgagagactttgttgaagtagcttataaacattctaatactataaaaccatcaataagaagcttagtaattaaaagtgggttctttatgagaaaagaagaacatactgagctagtgaaagatttaatagcaaaattaaatgctatgccagaagaagtctgttctggaaaaaaagttttattaacaggtatattagctgattctaaagatatattagacattttagaagacaacaatatatcagttgtagctgacgacttagcacaagaaacaagacaattcagaacagatgtaccagcaggtgatgatgcgttagagagattagcaagacaatggtcaaacatagaaggatgttcattagcttatgaccctaagaaaaaacgtgggtcacttatagtagatgaagttaaaaagaaagatatagatggtgttatcttctgtatgatgaaattctgtgacccagaagaatacgattatcctttagttagaaaagatatagaagatagtggaatacctactttatatgttgaaatcgaccaacaaactcagaataatgaacaagccagaactcgtattcaaacttttgctgagatgatgagtttagcgtaagttcattaaaataaatttactataaaatatgaaaattggaggaagctatgttatataacaaagaacaagaacttttaagaaaagcagtaagagattttgttagtaaagaattagatactttaccagcagaaatggataaaacaggtgtaatgcctaaggaattaatcaaaaaattagctgatgcaaaatttataagcagtaatatcccagaagaatatggtggtgggggagcaggatatgtttcttacgctatagtaatggaagaaatagctagaagatgtgcttcaacagctacttttgttacagctggttcttctcttgcttcattaccaatactttacaatggtactgaagagcaaaaacaaaaatacttaaaaggtatagcaacaggtgaattaataggagcatttgggttaactgagccaggagctggttctgatgcaggtggacaacaaacaacagcagaattagttggagaccactatatattaaatggtagaaaaactttcataactaatggaccattctgtgatgtagctatagtaatagcagttacagatagaagtaaaggacttagaggaacatcagcgtttatagtagaaagtaaatgggatggtttctcaacaggagctcatgaagataagatgggtataagaggaactgaaacttctgacttaatatttgaaaacgttaaagttccaaaagaaaacttacttggaaaagaaggtcaaggatttaagatagcaatgggtactctagaagttggtagaataggtgttgctgccttagctctaggaatagctcaaggtgctttagatgaagctgttaaatatacaaaacaaagagttcaatttggtaagcctatagctaaattccaaaatactcaatttactatagctgacatggaaacaaaagtttgtgcagctagaggattagtttatgatgcagcacaaaagagagatgcaggaatgagagttgctcaagaatctgctatggctaaatactatgcatcagaaattgcaaatgaagttgcttataaagcattacaacttcacggtggatatggatttataaaagattatgaaatcgaaagaatgtacagagatgctagaatcgtatcaatatacgaaggaacatcagaagttcaaaaaatggtaatttcatcaaacgtattaaaataataaataatctaatgaaattggaggtatagactttgaaaatattagtttgcgtaaaacaagttccagatactaacgaagtaagaataaataaagaaacaggtactcttataagagatggagttccaagtatattaaacccagatgatgcaaatgcattagaggaagctttaaaaattaaagatgagcatgatgatgtaactataacagttataacaatgggacctcctcaagcagactttatgctaagagagtgtttagctatgggtgctgatgatgcaatattattaagtgatagagcatttggaggagctgatacttgggctacatcaaatactattgcagcgggaatatctaaagtaggtgactatgacataatatttgcaggaagacaagcaatagatggagatactgcacaagttggaccacaaattgcagagaaattagacattcctcaagttacatatgtacaagatttcaaaatagaaggaaaagatataatagttcaaagacaattagaagatggatacgaattaataaaagtaagtacacctgtacttttaacagcagtaaaagagttaaatacacctagatacatgtctgttgataaaatagtaaaagcatataaacatgatgtaaaagtttggacaattgatgatttagatgtaaataaagaagaagttggtttaaaagcatcaccaactaaagtatttagatcatttactcctgaaccaagaggaaaaggagaaatcttagaaggtaaagctgatgaaatagctagtaaaataataatcggtctaaaacaaaagcacattatataagttggaggagtacaaactatgaatgatataaaagatttaagttcttataaaaacgtatggatatttgcagaacaaagagaaggaaaaatagctccagtagttatagaattattaggagaaggaagaaaattagctaaagaagtagatgcagaactttgtgcaatattattaggaaaagatgttgatggattagctaaagaattaatcacttttggagctgacaaagtttatgttgcagatgatgctcttttagaaaaatatacaactgatgcatatacaaaagtaataaaagatgcaatagatgaaataaaaccagaaataatgcttttcggagcaactcatataggtagagacttagcacctagaatagcttcaagagttggaactggattaacagctgactgtactaagttagaaatagacccagaagataagaaaataaaacaaactcgtccagcatttggtggaaacataatggctacaatcatttgtccaaaccatagacctcaaatgtctacagttagacctggtgttatggataaagctgaaaaagacgaaacaagaactggtgaagttatagcattagactacaaaataactcaagatgatataagaactactgttttagaaacagttaaaactaagaaagatttagtatctcttacagatgcaaatgttatagtatcaggtggtttaggattaggtggaccagaaggatttgaaatgcttaagaaattagctgacaaattaggtggagtagttggttcttctcgtgcggctgttgatgctggatggatagaccattctcaccaagtaggtcaaacaggaactactgttaaaccaaacctatatatagcttgtggtatatcaggagcaatacaacatttagcaggtatgcaatcatcagatttcataattgctataaacaaaaacccagcagctccaattttagaaatcgctgactatggagtagttggagacttacatgaaatagttccaatgcttatagaaaaattagatagcgttgatgatttattagaagctataaaagcttaatagatacaaactatataaatattactgattgaataagtcttattagttagtaacataattattaaccctttgataagttattgctagtgtgtatttgtcagttattaaaaagtctgtttgaataaaattttataatacaagataatctggataatccttatatgtatattgcttacaaattgtgagttatattctgtaaggattatctttgtttttttaaataaatcttaaatttaattaaattgtattaaatagacaaataattactaaatatgtgataaaatacaattaaaagcaaaatgaaatttttaacaaactataatcattaaaattatatcttagttacgttttaatgaaataaactacttgaaaagacgaatattataaggagttgattatatgtgctgatggtatttattgtaagcaaacaataaattttgtatgtagttcaataaattacttaatgaaaggtgcgaatattaatggataataatttaatagggcttatagaacatgtagaaaatccagccattttatgtaaagaatcaggcgaaataatatactgtaatcatctaatagatagtatttttagttttctagatataaaaaagcctagaaatataaatgaattagattcaaattttgacaaaacagaaatactgacagatagtaaaaagaaaatagctttcagagagttaaggatgactgcacatatatacaatatgaaagataataataatgaaaataatatagtttatttatttgagaagtctctaatatctgataaagtaattgaagatataatagagcatatagatgaagttgttgttgtgtttaacaaagatggggtaattgaaaagatgaacactgtcagtgatgagatattaccttttaaaagaactgaggtacttggtagaaatataacagaccttgtgagacaaggattagttgaagaaccaataatattaaacatgcttaaagtgaagaaaaagatttatagaaatatcgtttacccagatgggaagcttattgcatatacggcagttccaagatgggattctaagggaaagcttacaggaggagtactaacagggagagatatttcaagggttattaagcttgaatctcagataaaatatagtgatatatcagaagacacagagtatataagtcaaagtaagattatggacaatataaaaaaagttgttaagagagctgcagcctcagattcttctatatttataaatggagaatcaggtgtaggaaaagaaataatagcaagaacaatatataagtatagttcaaggagagacaaaccttttatagctataaactgtggagctataccaaatgaattattagagtcagagttttttggatatgaagaaggttcttttactggagctaagaaaaaaggtaaaaagggactttttgaagaggcgaatggtggaactattttcttggatgagataggtgagttaccaatgcagatgcaaaaaaaattacttagggttatacaagaaaatactattactagaataggtggtagtaagcctataaaaatagatgttagatatataagtgctactaatatttctcatgaagaccttagaaataaccttaaatttagacaagatttgtactatagattaagtgttattccagtaaaaatacctcctcttagagaaagaaaagaggatatagtaccattagtaaattatttcttaaaactttacaatgaaaagtacaatagagaagtagaagtttcacctaaagttattgagttattagaagaatattcttggccaggaaacataagagaattaaaaaacatcattgaaagatttgtagtattatcagctaaaaatgtaattggagaagatgaatttaacatgctgataaatttagatatgattgataatgaaacagatgatttatcaccaatagtggtaaatggaattatgaatcttaatgatgcatataaaatagtggaccaaataatgataagtaaggctataaataagtatggttcaataacaaaggctgctgaagttataggtatatatccttctaccatccatagaaagataaagagtggacatattcacgtttagctgtcagtttaaaaagacaatataattaaaatattataagatacataattgatacaacttaaaagagatggcttaaaaataaatttaattactttaagtcatctcttttcttttataaatatttaaaagttatattagtttatagagttagcagaacctaaaacatcatctatcttgctttcaactacagcttgtatagcatctctaccagcaccaatgtattttcttgggtcaaattcttttggattttcagctaagaattttctgatagcagcagtcatagctagtcttaagtcagtatccatgtttattttacaaacagccatagaagatgcttttcttaacatatctacaggtacacctttagcaccagctatatttccaccaaattcattacatgtagcaacagcgttttggtcaacagcagatgcaccatgaagaactattgggaaacctggtaatttgctttggatttcttctagtatatcaaatcttaatttagcttctcctttgaatttgaaagcaccatgagaagttccaatagctattgctaatgaatcaacacctgttctttcaacgaactcaactgcctcagctggttgagtatacttgtgaacatcagaagtaacatcatcttctgttccagctagaacaccaagttctgcttcaacaacaacacctttagagtgtgcatattcaacagcttctttagttattctaacattttcttcaaagtcaaaatgagaaccatctatcataactgaagagaaaccagcatcaatacaagttttaatagcatccatatttggaccatggtctaagtgaagagctacatctacacctatttcatcagaagcagccttaaccatttcaactaatgtatgaggtccagcatatttaacagctgacatagaagcttgtatcataacataagaatttttagctttagcagcttttaaaacaccttgtaattgttctaagtcacttatgttaaatgcacctatagcaaatccaccttcgtaagcttttttaaacatttcttttgtagtaattaatgccattttaaactcctcctattaacttttaaaatttacccatcacttatattataacgttaaatcaaaaaaagtatatagtaaattgtaataactataaattacaagtataatgttaaatagaagacaataggattaaataaaataataaagaatataaataatttaggaaaattagctatataatgctaactataagggtaggaactaccttattagtttggagatactgataacaatagttgtcttgaccaagaagttaccacttcaaacgttatcgaagggaattaagtggatgataattcactaaaaatttaaaataaaggagataaactatgccacagataaaaataagaggaattaatgaaaatgatatatgtaaaataagtaaaaaaatgataaatgatttagttgaagctgtaaaatgtccaagagactactttgaaatagaatgtataaagtcagttgcaataagagatggtaaaatagcagatgtatatccttttgttgaagtagcttggtttgatagaggacaagaagtacaagatatagtagcaagaataataactgatagtataagaaataatttagatgtagaaagtatggatttagcatttacagtatttgaaaaagaaaaatattatgagaatggagagcatttttaatggctaaaaagcaacgtatagataaaattctttcaaatttaggttatggaagtagaagtgaaataaagaagtattgtaaacaagggtctgtagtagtaaatggaagtgaagtttcaaatccaggaactcaagtagacactgaaaatgatgagatattatttaatggagaagaagttatatatagagaatatatatatttgattaaaaaatagctacgtacactcgtgactttagtcatgagttagtagctaaaatagtcagcatatagggaaacttatatgtagagataggatagagcctatccaatactacttgaattgctggaaacccctaaagctaaccaaactaaaacataaggatgaaataaacctaagtgtgaaagttacgaaagtagaaaaaattggttagatggtataaggttaaaccctaagtactttaaaatgggcaatcagcaggtaagctccgaataggagaaacttcaacgactattcctcttgagggaagtacactacaagctatcggtagtggaagtgggtagaccttagcggataatgccgaaggataagatatagtctgtgcttgcatgaaagtgtaagaagttcataagagaactgcataggtagtagcgaacttatgtgaacgacaacctcaaaaatgataaaagttaagacttacggttcttaaatatgttatttaaaattaaatataaaaccttctaaataattgttttaaataattacatttgttaacattattataggtgattaataaattgttcaccacagcattatataatatattaaatatgataaaatcattaaaaagtgtatcaaaaaacaattaaagtgaggtgatagcagtggaaaaagcttataagtttagaatgtatccaaataaaaaacaacaagagttaattaacaaaacttttggatgttgtagatttgtatataataagtatcttgctaaaagaatagaagtttataaaaacgataaagaaacttttacttataaacagtgtagttctgatttgactaatttaaaaaaagaattaaaatggcttaaggaacctgacaaattttcactacaaaacgccttaaaagatttagataatgcatataaaaaattctttaaagaaaaagcaggatttcctaaatttaaatcaaagaaaattaatagattttcatataaaactaactttacaaatggaaacattatgtattgtggtcaacatataaaactacctaaacttggtatggttaagataagggataaacaagtacctaaagggagaatacttaatgccactatatctaaagaaccaagtggtagatattatgtatcattatgctgtactgatgtagatattgaagtatttgaaaatactaataatcagataggtttagatttaggaattaaagaattttgtatctcaagttgtggagaatttatagaaaatcctaagtatcttaagaagtcattaaacaagcttgctaaattacaaagagaattatcgagaaagacaatcggtagtttaaatagaaataaagcaagattaaaagttgcaagacttcaagaacatatagctaatcaaagaaatgattttctacaaaaactatctactaaattaataaaagagaatgatattatttgcatagaagatttacaagtaaagaatatgattaggaattgtaaactatctcgcttaatttctgatgtgtcatggtcagagtttattcgccaattagaatacaaggctaattggcatggtagacaaattgtaaaggtaggtaaattctttgcaagttcacaaatatgcaataaatgtgggtataaaaacgaggaagtgaaagacttaagtataagagaatggatttgtcctagttgtaatgaaactcacgatagagatataaatgcaagtataaatatattaaaagaaggattaagactaataacaactcaaaataaataacttatgtaagaaccgtaggaactacggggatagcctgtggagaattagtaagacatattttagtatgcaaaattctgtgaagcaggaaccctgtgactttagtcatgggaggttcaggatgaataaacctgatggatatatatcagcaactacagataaatatgacccaacagtattagatttaattgatttatcatacttagcttttgaaccatttcctgttggaaggttagataaagacacagagggattattagttttaactaatgatggaaagctttctcatagagttttatctcctaagaagcatgtgcctaagacttattatgcaaaaattgatggagtagttactgaagaagatgtagaagcttttttagaaggtgtagtgcttgatgacggatataaaactatgccatcacagttaaatatattaaaaagtgatgatgaatcagaaatagagcttacaatacatgaaggtaagtttcaccaagtaaaaagaatgtttgaaagcgtaggcaaaaaagtagtatacttaaaaagattgtctatgggcaatttaaaattggatgaaagtttagagttaggtgagtatagagagttaacagatgaagaagtaaaattgattgaagaaagataataaagatactatagtaaattggaggaatgtctgtgaagaaaaaagatgttatagaatttgaagtagataaaatggaatttggtggtacatctttaagtcaagttggagatagagttatccatatgaagggtggaataagtggtcaaaaggtgagagctggagttaaaaaagttagaagtaagaaagctgaagttaagatgatagaattattagagaactcaccacttgaaactgaagaaacttgcaagcactttagagagtgtggaggatgtacactattgtctgtgccatatgaaaaacaattagaaataaaagaaaaacaagttatggatttatttttaaagcaagatttatttggatttcagtttttagggatagaaggaagtccagaaaacaaatattatagaaataagatggaatatacttttggagatgaagtaaaaaatggacctttgacattaggtcttcataaaaaaggaaagcatatagatatacaaactgttgaggagtgtatgttggttgatgaagacttctcaaagatattagtttctagtgtagagtttttcaatgaaaaaaagcttccttattatagaacaatgaatcacaaaggatatttgagacatcttgtagttagaaaagggattcatactaatgagattatggttaatatagtaacttcttctcaagaagattttgatatgaatgagtttaaagatatgcttttagggattgatttaaaggctgagttagtaggtgtacttcatactattaatgatggtttagcagatgcagtccaatgtgatgagttaagagtattgtatggaagagattatatacaagaagaaattttaggtcttaagtttaagatttcaccattttcgtttttccaaaccaatactaagggagctgaggttctttatagtattgctagggattttattggagattacaatgataaggttgtatttgacttgtatagtggtactgggtctattggacaggttatggctggtgctgctaagaaagtgtatggtattgagatagttgaggaagctgttgttgctgctaatgagaatgctaagttgaatggacttactaattgtgagtttattgctggggatgtggctaaggttgttaaggatttaaaggacaagcctgatttgattattgttgaccctcctagaccaggcattcataaggatgctattagggatatttgtggatttggtgctaaggagattgtttatatttcttgtaatcctaagtctttggttgttgatttggttgattttaaggggtatggttatgagattaagatggttaagtgtatggatatgttcccaaatacgccacattgtgagactgtagttaaacttattagagaataacagggtttcagacttttatattgtgtcttaaaagtagatttgccacctatttgccaccataattatttttgggtggcaaatttattctacaatgatttcaaaaatatttaccatctggtttctcatgttattagttacatgtaaatatgtatccatagttgttgaagttttagcatgtccgagtatatgctggatatcttttatattagtaccattttctaataacatagtatcagggtttttaaaataaagtgtgtattcttctagagtagtgataattaaaatatcaaatatcactatacaaaggaaagtgcaccctttttatgtttagcaaaaacgaaatattaaaaaaacttattgaagaatatgatgtcaaaacaactacagatattcaagatatgctaaaagatttatttacaaatacaattcatcaaatatttccattgtcgaattttaacggtttaaacataatatattgactgatataataaaatcatagaatattttagggggaaatagattatgtttaagaaaaagttaatagctgttgcaatgagtataactatgattagtgtagggagcttttcgtatgctcattcaggaagaactgattcatcaggaggtcatcgtgataataaaaataaatctggattaggaagttatcactatcattgtggtggttatccagcccatttacataataatggtggttgtccttatactggaggaggaagcagttctggaacaacaacttcggttaataatgaagaaaagcaaaagaggtctgttggagaaaaaggatataatcaagggtatgaagatgggtataaaggaaattatagttcatcaaattatagtggagattatagtgatacatatgaatcaaagtactcagaaggatatgaaaaaggtaaggctaaattagaagaggaagaaaaggtggctaaagagactggatataatttagggcttacaggtgctaaatctaataatacatatgaaaaagaagttttaaaaaatgcttatgataccggatattcaactggatacaatgaatataagactaaaaagatagaagaatataaagctaaagggatagaggatagcaataaagataaagaaaaaatgacatttgaagaaaacatagattctgaatttatagatgcttataataatgcttatgacgaaatacaagaacaattaaaaaatgattacactactcaaggatttgagagtgctatcaaaggagaaagatttgacacatcaactataggtaatgttaaatatgctaattggtttaaagaaggatatgataatggtaaggttaagttacctaaagcaaaagaaagtgtatataatcaaggttacaatgaagaagattttagtataccatatgaaatgaagtctattgaaactaagttaaaaggtgtatatgatgaaggtttagaaaaaagagaagaagagaaaagtagaaatgctacttatggggttggagctggaacagcagctgtagttgctggagtagtatataaaaataaaaaacgtaaaaagatatagatgctagatataccaatgatgacaagtgtataacaaatataattttaagtataaatatttaaaatatagaagggaaggttatatctatgggatttaactttaggaaaagcataaatctaggaggaggactcaaattaaatttaggtaagaagagtgtaggtataagtgctggtgttaaaggtgctagagtgtcagttaattcaaaaggaagaaaatcagctacattgagtatacctggaactggaatatcatatacaaaaactagtacaaagaaacgtaaacctaaataaatatttgatatactaagaaatagactgttacaaatagtctattttttagtatatagatttaaaaagtgacaaaattttgaaatataaactaatttcataaaggaaaatattcttttatgtagaattataatatttaagtaatattataaaatttataggaggatttcattatgaaattaagcaaaacactattggcaatagggatgtctgtttcattattgattgctagttgtccaacatcaaacgctcttagttctattaattcaataaaaggtacaaataagtatgaaacagcaggtttaatagcagataaacaaaattatgatattgcaatacttattaattctgaaaatggattatctgatggattgtcagcaagtggattgtcaggagctaaaaatgccccaatattgttaactaagaaagatacaatcccttcagaaacattaaaaagattagaaaaggtaaaagaagtatatctaattggaggaaaaaattcgataggagcatcagttcagaaaatattaagtgataaaaaaataagcataaatagaataagtggaactgatagaatagatacaagtcataaagttgcaaaagaaataggaagagtaagtacggttaaaaaagtaatattaactaatgcttttaaaggcgaaccagatgctatgagtgttgcttctatagcagttagagataaatctccaatagtattaactgatggaaatactacaagttttgctacagatggattagaaacttatgcaattggtggaaaagtcagtatgagtgataagttaataaatgaaactaaagcaacaagaataggtggagtagatagatacgatacaaataaacaaataataaataaattttataatggctcaaaagaattttacatagcaagtgggactgatttagtttattctttagttggttctacaattgcacaaaaaacacctatagtgttagttggaaatggaagtaataagagtatattaaaaaatgcaagtaaaataactgctattggaaatattgatgatgttattataaaacaatgtttaaatataactaataatgttggggattcaaatacaggtattgtaaaagatactaattcaaataatacaaacaaaccaagtaatgagcctagctctaataatcctggattaactgataaaagtacagtatatgtaactcctaatggaaaatcatatcatctaacaaaaaattgttctacactaaaaagaagtaaaacaataaataaagtaacattaaaacaagctaagtcacaaggtaaaatagacccttgtaatgtttgtgtaaaataatgtattagccaaatatatattaaaaaagacaattaattaagattgtcttttttattgaagaaatataaatttatattatgtattattaaaaagaaaattattaattataaaaaataataataaagacgataagtattaaaattttatgtttccaatatttatgatataattaatatggcaaggaataaatatttgaaaaagctatgagtggtgtttccatggaagtttcttcactttcttatgagaggaggtgaaaactatggaaaatctaatgatgagtattataactggtgttatagccagttacatttacgataaattaaagagccactctgaccaatgaactatacccactgttttatacagttaaaacatgtaaaagtggttataaagtactagtgtcaatcattagtactttttttattatattcatataattaatagctatattttaaagtttactatctaaaaaatagcacgtcaaataaaaccctagatatttaaatttttttagagctacttaaaataaattatgctatctctgtacttaaatatttcctaaattcaagtggagacatagaatttaatctcttttgatatctaaaattattatagtaatatatataatcatctattgctttgactaattgttcgtatgtatcaaatttccttaaatagtacatttccacttttaaaattccccaaaatccttccataggagcattgtcaatacaatgaccaactctcgacatactttgtatcatgccttgtgttaaaagttttgatttaaacaccctgctagtatactgatagcctctatcactatgaaagataggttttgcatttggatatacttctattgctttattaaaagtttcgaatactaagttattgttatttgattttccaataacatatgaaactatgcttctatcacctaaatccagaattgcacttaaataagcctttgtcccgtcggttaatttaaattcagttacatctgttaaccatttttgagaagttttatctgcactaaattttctatttaatacattttcagcaattacttcttgtgtacatttaacataactaaatttcttttttctacaaatagaccttaagcctacggctctcattagtctgtacactctcttgtgattgacattaagtttatactctctgtttaactgcaaggtcatccttaaagagccaaaaactcccttcttttcttcatatatcttagttatcaaagttgctaatttaatgttttcaagttctaaattacttttatctcgattgagccatttatagtatccagaacgatttactttagcgatttcacataattgtataagcgaagcttttttttcattgaataaggattgaatcgctttatatttatcttcattcttggatagtgtaattaccaccctctttctatgatttttaacttttttaagaattcattctccagttgtaatttgtgtttttctgcttttacaattttcaattccaactttatttcatctaattgagttaactcatcttctttttttgatttacctcttcggtcttctaaagcatctatcccattttctttatatttaagagtccatcttctaacttggctgtatgaaacaaagtatttttttgctattaaattgtaattaagaccatgttcaatacaatctttaacaatttcagctctttcatctaatgttgtttttctagtctccataaagagtcctcccttcggggtttcttttatcaccttatgaagattatactctttaacccaagcttttagtggatgaactgatctcattttatatttttttgagatagtatcataagatccttccccatttagataagattctatagcatttaatttaaactctttagaatagcatgatttgtgactttgttttattaaaccatcatttccaaaagtttcataatttcgcatccactctctgaatgtacgttttccaatatttaattcttccattatttttattactgaattttcaccctttaaatatgattcaattgcttcgattttttgctctgatgatactttagttttagacataacaaaaccctcctagtttcagacagttttacatatttcaactgtctcctaagaggggtatagttcacaactaagagtggctgggaacttaatataaagttccagaaaagtaaatcttcaaaataatttattgaaggaaacatcactcaaagttaagtaaaatatgtttccttgcttttattatatcacaaattaaaaatattaacacaaaattttgtgaatatatacttattattgttctaaaaaaatatgtaaataattgatttgatttcatagaattattgttgtaatatttagttaaatatacacaatctcaattaaagaagataagtattataaattcatatcaaaaaaatacataaacttttaagttataattttataaaaagtcttttagtatcattatttcaagaggaattaacatatgaaaaaataacttcattagaaaagtggataaaaaactggtaagaagatgactaaagattacatatactattacttaaattaaaaatttaatataatttataatgtatacaatttattataaaaaatttaattttaattttctatttttgatactataatatataatcttgataatttaattaaaaatctagattttacataccaaactggtttcttatttcgctatctttacttatgaactcatatattcctataaaggttattttagaaaaagttggttatttaaacattaataccacaatttctatagattgtttgttgaataatctataattatattatggactaaaaaatccaatgagttaatttattgtttttttatatttgagagattacaacttattagtttgtatatctctttttttaataaaatcaataatatataaaactattggcatatttaatgacaattcaaatattgtatataaccataatgaaagatatataaataaaattttaaatatacttaaaaatatattaatataatgtacataaaaaatatcataaatatatgataagataaatacaatagcaatattttattaattttttgggtttttatatatttaggtactggggtgatatagttgaaccaagagatattttttaaaataatgaatgaaatattggaaaatattgatgaaggggtacattttgttaataaagacgggaaaactataatctacaataattctgtacaaaaaatggaaaaaatgaacagacacgatattttagccaattcattttttgatatagtcaacaaaatgaaaataaacaggagtacactattagaagttttggaaaaaagggaagttatcaaagacaatattcaaaaatatctggacaaaaatggaaaagagataacagcaattaatactacaataccaattgatattaaaggcgagtttgtaggggcacttgaaatatcaaagaatatgacaacgatagaaaatttactaaacagaaattataaaaaaaatttagtcaataaagttagtagtagacaaaaaaagggttatgaatttgatgatattttaggggaaagtaatttgattaaagaagcaatagaaaaatctaagaaagcttgcaagtctgatgcttcagtatttatatacggtgaaactggaacgggtaaagagttatttagccagtccattcattatggaagtaataggagaaactatccatttatagcacaaaattgtgcggctttgccggaatcactattcgaaggtatcctttttggaactagcaagggaggatttacaggagcaatagataggccaggcttatttgaacaagctaacaaagggacattgttattggatgagataaattccatgcctattatgttacaggctaaactattaagggttttacaagaaggttatgtaagaagggttggaggaactaaggatatacctatagatgtaagaattattgcaacgacaaatgaaagtccaaaggtaattttaaacgagcataaaatgcgaaaagatttatattataggcttaacataattcatataaaaattcctcctcttagagatagaaaagaggacatacttctattgtgcaaaaaatttatttcaaagtataataaaaagttaaataaaaaagtggtaggaatttcagatgaagctattaaaattttaaaaaattacgattggcaaggtaacataagagagctagaaaacataatttattgtactatgagtatgatggaagatgaggtacaaatagaaacaagtatgattaatctaaacgactattacaatcttaaagagaataaagagagtaacaattattctttaaacgatttggagggcaaaacacttagtaagattatcagtgagatagaagaaaagtatatatatgaatcattagaaaaggcatcgtacaatataactaaagctgcatcaattttaggtatgaataggcaaaatttacagtataaaataaaaaaatataatatcaaaatattataaataagcaagataaaaaaacaaaatagaagtaaaataaaaaagcaaaatataggagcaaaattattataaaagagcaaaatattttgctcttttttttatttctcataagaaatattattttttatttatgaaaatacataataaaataattatagtttcaacgttccaataaatatttactttaattttaaagttggcacgatttatgctttaactaattattgagaatatataaatttttaggagggtgtatatatgagaaaagtaagagtaggaatatggggatttggagctatgggaataggtatggctaatatgattctaaagaaagaaggtatagaaatagtatctgtttgtagtagaagtacttcagggaaaagtatgtatgatgttttaggaattgaaagaggagaaagaccagaagttattatcaataaaaattatgaagaagtttttagagaaaaaagtgtagatgttgttttgttagcaactgattcatttactaaaaaggcttttgataaaataattttcttattaaatagaaaaataaatgttatatcaacagcagaacaaatggcatatccacaagctgatgatgcagatttagctaaaaaaatggatgaagttgcaaaggaaaatggagtaagtatacttggaacaggaataaatccaggatttgtattagatttactagtattggcactttcaggtacttgtgaagaagttactagtataaaagctaagagagtaaatgatttatctccatttggaaaatctgttatggaggaacaaggtgttggagtaacaagggaagaatttataaaaggtgtagaagataagactatagcaggtcatgtaggttttgtagaatcaataaatatgatagctgatggattaggttggaaattagataagatagaacaaacaaaagagccaataatgactacagtagatagaaaatctaaatacggagaggcattggctggaaatgttgctggttgtagacaatgtggatatggatatgtaaatggagacgttttaattgaaatggagcatccacaacagataataccagaagtagaaggtattaaaacaggagactatgtatcaataaaaggtataccaaacattgatttacaaataaatcctgaaatacctggaggagtaggtacttatgcaatgatagtaaactctattccattaataataaatgctagaccaggtcttaaaactatgttggatataccagtgcctagagcaataatgggagacataagaaatcagatagaagttgaattggaagaagaatcaaaggctaattagtaagataacagttagctaattggtaaaataatgtttaatttaaaataacagtaaattaattagtaaggaatagtcaattaataaggggatgaaaaaatggatgctaaaattaatgattgggttattatacacaatatagtattgactccagaagaaagagctccacaagttccagaggatactaagaaagtatccttagaaatgtgggttaaaggttttatacaaagtgatgcttctataggcgacttagtagaagttaaaacaattacaggtagacttgtaaaaggtaatttacttaaagtaaatccatattatactcatgattatggtaaatgtataccagagttactccaaataggaatccaagctaaagaaatattatttggaggtgtatataatgaataattcaacatcaataaaagatatgagttatcaagctgttatgggaagaaataacgaaataatgaaaaatgcaatcggattggattattcttcttttgaacaagagggaatagggtttgattatgagaaaatgatgagtgaaacaggatatacattacaagatattgaagcaattcaatcacagtatgctgttggaaatactcctctaatagagcttaaaaatttgactaaattagctagaaaatgtgctaaagaaggtaaaggagctaaaatatttgtaaaagatgaagcaatgaatgcatctggtagttttaaagcaagaagagcagctactgcagtatatcatgccaaacaaatgggatataaaggtgtaatagcagctaccagtggtaactatggtgcagctgtagcatcacaagcggcaatgcagggattaaaatgtataatagttcaagaatgttatgattctaatggtgtaggtcaacctgaaattatagaaaaagcacgaaaatgtgaggcatatggagcagaagttgttcagttaactgttggaccagagttattttatacgttcttagttttattagaagaaacaggctattttaacgcatcattatattcaccatttggaattgcaggtgtagaaactttaggttatgagttagctatccaatttagagaaaagtataaaaaagaccctgatatagttgtttgtacaaatgcaggtggtggtaatcttactggaactgcaagaggattgataaaagctggttccattaatactaaagtagtaggagcaagtgtagatttaaaaggattacacatggctagtgataatcaatttaataaaaaatcatttacaacaggacatacaggttttgggataccatactgtacatggcctgataggtcagatgtacctaggtctgcagctagaccacttagatatatggatagatatgtattagtaaaacaaggagaagttttttatacaactgaattattggcacagctagaaggtatagaaagaggtccagcaggaaatacatctttagcagcagcattctctttagctcaagagttagatgaggataaagttatagtggtacaagaaacagaatatacaggcgcaggtaaacatatatgtccacagcttacttttgcaagagaaaatggaatagatataaaatttggaaatccaagagaagaaattgcaggagtaaacttaatattaccagaaagaccagaattattgaaatgtgttgatattgatatgaataaaataagaaagtcatttataaaaaattgcatatctaataatcacattgataatattgataagctaagtaatcgagatatagaatttttaatggaagaagtaaaaagttcaagagattttgttgttgatgtattaaataatttatagtaattattgtttttttatttaatataaaataaaaattcggaaaattctattaaatcaatgcgaatggaggaatgttcatgaaaaaaagagaggatgattttgaagttagaagaaaacatcttcaagaactgagtgatgatgagttaaaagaaaggttttggaatttagctacccagatagtagaaccaatgatagaacttggtaaaaagaatacaacaccatcaatagaaaggtctgtcttgttgagaatgggattttcttctcttgaagtaaaacctattttagaaggggttatggaaagaggtcttataggtaaaggagcagggcatgtagtttataaattggctaaatctaaaaatataacggttagagaagcaggtttgttattagttaagggtgaatattgggatgaagttacatgtttatttagagaaggggtagaatcatgttaaaggaaaataaaaaattggatatagactatatattaaaagatttggataaatataaaccaaaacgaagaggttgggtttggagagaacacttggaaaatcttgaaatgggaccttttaaatataaagactgtacaaaacctttaaagaagagtgtagggctaccatcatctaagtatttcaataatatagaccctcaaccaagtccagttattactactgaaatagcttctggtagatttgaggatgatataagaagaatgagaatggcagctcatcatggagctgaccatctaatggttatcagaactgctggacaatcacattttgatgggcttatagaaggaactccacaaggtataggtggagttccaataacaagaaaacaagtaagagctcaaaggaaggctcttgattttatagaagaagaagttggtagacctattaattaccattcatatgtaagtggtgttgctggtcctgaagtagcagtaatgtttgctgaggaaggagtcaatggagcacatcaagacccacaatataatgttctgtataggaatataaacatggtaaggtcttttgtagatgcttgtgaggcaaagaaaataatggcttttgccaatatagctcaaattgatggagcacataatgctaatgctactgctagagaagcatggaaggtaatgcctgaacttatggttcaacacgctttaaactctatattctcagaaaaaataggtatagataaaagtaatatatgcttatcaacagttccaccaacagcacctccagcaccatgtttaagaatagacttaccttacgctgttgcacttagagaattatttagtgattataagatgagagctcaaatgaatactaaatatatggaatcatcaactagagaagcaacagttactcatgtattaaacttattaacatcagtattaactagagctgacatacaatcaactataacacctgatgaaggtagaaatgtaccttggcatatatacaatatagaagcatgtgatacagcaaagcaagctttagttggtatggatgggcttatggatatgatagaacttaaagatgtcggtgaattaagagacaaagcaagagaacttaaagaaagagctgtattatatatggaagaaatatctgaagttggtggatattttgaatctgtggaacaaggattttttgttgattctggaaattatccagaaagaaatggtgatggaatatctagaaaaataaaaggtggagttggtgaaggtactgtttatgaaagagaagaagattatttagcacctgtaactgctcactttggatacaataatgtagctcaatatgatgaaaatgctatagataatccatcaatgttaatagatggatgtacatttgaaaatccagacaaaataatatatattgatgagcttgacgattttgataatgtagaaaatagactaaaagaatcatatgagtacagaaatggaactaaaattaagcctgaaatggaatggtgtgcagatggaattgtaatgataacaatgatgcttcctactgataaaagaacagcagagtttgcagctttggaatttgtcaaaaaaatgaacttacaagaaattgaggtcataagtagagaagttatgcatgaatctgaagggactagaatagaagtgaaaggaagagttccgtttgatatagatttaaacaatttagtaataccagaagaacctaaggtactaactgatgaagaaataagagcagatatagaagaaaaacctatgaaaatagtttcagctacggttggagaagatgaacattcagttggtttaagagaaataatagatataaaacatggaggtattgaaaaatatggcatagaatgccactatctagggacttctgtacctgtagaaaaattggtagatgcagcgattgaactgaatgcagatgcaatacttgcatctacaataataagtcatgatgatattcactataaaaacatgaaaaaattacacgattattgtgtagaaaaaggtataagagataaagtaatgattgcgtgtggaggaacacaagtaacacctgaaatagctgttgaacaaggcatcgatgctggatttggaagaaacagcaaaggcatacatgtagccactttcttagttgaaaaaagaagagaaatgagtaataaataatggaaaatagcaaagtttctttaaaaatagatgtgttggtagctgaaattggaagtactactacagtggtaaacgctttccacgatattaatactaacaatcctatatttttgggtcaaggtcaagctccaacaacagtgtttgaaggtggcgatgtaagaaatggcttatcaggtgctattaaagatttagctaataaattatctgtagatgatatagagtataatgatatgtttgcaacttctagtgcagctggtggattaaaaatgactgttcatggattagtctatgatatgacagtaaaagcagctaaagaagcagctttaggggctggagctgttattcgtcaaataacatcaggtagaattaaaagaactgatttaaataaaataaaagaaataaacccaaacataattttaatagctggtggagtcgattatggagaaagagatacagctatttataatgcagaaatgatagcttctatgaatctaggcataccagttatatatgctggtaatgttgaaaatcaagaggaaataaggttaatatttgaagatactaattataagctttatataactgaaaatgtataccctaaaatagatttattgaatatagaacctacaagaagaatcattcaaagtgtatttgaagaacacataactacagcaccaggaatgaaatacattaaagaaatggttaatgaaaatattactccaaccccaggagctgtaatggaagcttctaaacttttatataaaaatattggagatttattaactttggatgtaggtggagcaactactgatgtacattctgttacagatggaagtgactatattaataaaattttggttaatcctgaacctactgcaaagagaagtgttgagggggatttaggtgtatatgtaaatatgaagaatatagtagaagttataggtaaagaaaacttacaaagtgaactatatatagatattgatgcagtaatagagaattatcctccaataccaaaatcaaaagaagaaatattatttgttgagaggttgacaaaagaagctgttgttaaagctatgctaagacattcaggaaaaataagaaatatctatggaacaactggaaaagtcaaaattgcagaagggaaagatttaacagaagtaagatatatagttggtacagggggagcacttactaggctccctagtagaattgaaatattagataatatgctcaaatacaataaaaataatgaattactatttccaaaggaaaaaacaaagatattaatagataatgactatattatggcatctatgggtgttttatctaaaaaatatgaagaagcatctcttaagctcctgttaaaaagtttgaattttgaggaggaaagattatgtatcctaggttagaaatagatatagaaaagttaaagcataatgcaaaattaatttcgcagatgtgtcatgaaagaagtattaagatatcttttgttactaaatcattttgtgcacaaaaagaaatagtagaagaaatatgtagtgaaggaatagaccatatagcagattcaagaatacaaaacttaaaaaaattacaagatataaatctacctaagatattgattagaatcccaatgttaagtgaattagaagaagttatcaattattgcgatattagttttaactcagaattagaaacaataaagaaattaaatgaattatgtgaaagtaaaaatattattcataagatagttcttatgtttgacttaggcgatttacgagaaggatacttttatgaagaagacttttttaataatgtaagagagatagtaagattaaaaaatattgaaataattggtatagctacaaacttaacctgttatggagctattataccatctagggaaaatataggcagactggtaagtatagcaaaaagaatggaagaaaaatttggaataaatctagaaatagtatctggaggtaattcaagttctattcatctgttgataaataataatatgccagaaggtattactaatttgagaataggcgagtccattctacttggtagagaaacggcatacggtgaaaatataaatggaacatatcaagatgcatttaaattaatatgccaagtagttgaatgtaaagaaaaaccatcagttcctattggagaaataggagttgatgcctttagaaataaacctgtttatgaagataagggaatcttaaaaagggcaatcatagctataggtaaacaagatataaatattgactctttaattccaatagacactgatataaaaatattaggggcaagttcagaccacatgatactagatgtaagtaacacaaaatatgattataaattaggtgacaatttagaatttttattaacttatgggggtatcatgtcatctagtacaagcaaatatgtttcaaaaaaaattatagtgtagtgtttaaataattaggaggaaactattttatgaaagagcgagaatgtagaaaagcaagtctgtttgatgcaatgataccaattacttgtttgatattatttttaagtctaggagtattagtgtatggttcatcacctcatgtaccactaataggagcagcagcagtagcaggacttgtggctgtatatagacttggatttaaatggaaagagttagaattaagtatgtttaatagtataaagatggcaatgcaagcaatcttaatcataattataataggcgtacttataggaacttggatagtaagtggagtagttccatgtatgatttactggggactaaaaattttatcaccaaatatttttttagtagcatcaacattagtctgtgcaatagtatctcttgcgacaggttcatcttggagcacaatgggtacagtaggagtagctcttttaggaattggtcaaagtttaggtatgccaattggattaatcgtaggttctataatatctggagcttactttggagataaactatcacctttatctgaaacgactaacttagctccagcaatggcaggaacagatttgtttacacatataaaatatatgttatattcgactataccatcattattaatttgtttagtaatttatggtgtaattggaatgaagtattcaggtcaagcactagatataaaacaaatagaattaattaggtctacattagattctacatttaatactttatcaccagtattattattagctccagcaatagtaattggattagttgtatttaaagttcctgctataccagggcttatagtaggtgctgtattgggagtattgtttgcagtagtttttcaaggagaatctatgaatacgatattagatgcagcacaaaatggatatgtttcgtcaacacaaatacaggaggtagatgctttattatctaaaggtgggattatgaatatgatgtccactgtatccttaacaatatgcgctttatctcttggaggtattttagaaaaaacaggtatgcttgaagtagtagcatcttctttactaagattagcaaagggtgtatttggaacagtattatgtactatggtaacttgtacaattaccaatataatagcaggtgaacaatatctatctatagttataccaggaagaatgtataataaggaatataaaaagagaggtatacatcctaagatgttgtcgagagctttagaagatagcggaactttaacttctccattagtaccatggaatacatgcggggcgtatataacagcaacattaggtgtatctgcactaacatatggtccatacgctttattaaatattataaatccaatagtatctttagtattaattgcatgtaagtttaaaatagcaagaatagaagatgaacctgaaacttgtttaaattttgatgtttgataatagataacttatgtaagaacgtaggaactagggggggagcctgtggggaattagtaagacatattttagtgtgcgaaattctataaatcagtaatcttgtgactttagccatgggaggttcagattagtaaatttatagttttatattagtctatactttgatcttttaattgtttgtataaattttttatagaaaaagatttcttttagacttgcctaaaaattaggcaagtcttttaagtatgttctgattataagagcactgtgtgacaagaatgatgagattatttttgctatactttcgatataagaaatggaaggaggttatgttttatatttatatgaaataattagttacacagtgaattttcgtataatttggtataaaaagattagaaatgaaaataaagtaatggaggaataaaatgactagaatatccaatataacaatagctgaacaatctgagtactgttttttggcaatacgaaaaacaattgactttatggtagagttttcagagttttcaaaacaaagttttgaaaaaatttctaaatatctggaggagagaggaattttatcttcaggagcaccgattgtatgttttcataacatggatttagcaaaattggatgttgaagtagggtttcctgtagccacttatatagatgggaaaaatgagattctacaaaggattgttcctgcacagaaaataataactgcaattgatttaggaccttatgaattacaagaccctactttagaagacttattttcatgggcaaatagcaatggatataaacttcatggcgatatatattaccagtatttaaatgatatcaatcgtccagctagtgaatatcttacgaaaatgatgttacccattatatagaaagttaaagattatcgtttgttagttgataattagaagaacatttaatgctactgcataaattttatcctaaataatatcaaggtgatttaatttatgtattctaatgtaactgtagataatcaatttataactaacttagtgtaatttagatttaatttattattctaatgtaaccccaatatattgttaaggtctacttaagatgctcaaaaggctatgcttaatttattgttatataatttgtagagtggtataatttagaagtgatactatatagatatatagggggaaaatatgaaaatatatgatatattaacacgtttttatattcaagatatagaaaaagccatacctttttatgagaatcttttaaaagaaaaatgttctttgcgtttttcttataaagaagttgggttggaattagcgcaaataggaaatgttttactattatctggttctgatgatgctcttaaaccatttatagaaacaaaatctacttttatggttgattctgttgatgaatggagaagttatctattggataatggagcagttgtagtaagagataagaaaaaagttcctacaggatataatatgacattgagacatccagatggtacaattatagaatatgttcaacatacaaagcaggattagttaaaaatagattttactactgagcaactaattagaatctattcttagacgtacaatttattatttttggtattaatagattataagtcaaattataatatttcaaaatagaatagaaatttatttacataaaagagagtgtttaaaaatgaactttttagttcacgaagcactcctttttgtatgaaatcaaatacatcaatatataaaacaaactgatgaagagcttaaattaaaataaaaagattcataacaggaccccattaaactttaagatagggtaagtttgtaatcatattaaataattgtaaaaagctgtttttagtcgtataatataaatatttatcatttaattaaggaatctaaaaggaatctaataagaagaaaataataaataactttttagatttactaaatgaaaaattattgaaaattaaaggattagagtctttaatcagaaagtaaaaagtaatatattaaatttatgaattgaaaacttaaacaacaaatttgtttataaaatagcaagattcattaaatataactaagtaataattgatataatgttgcatggataaaaggagggaagctgcaatgtcttacaaagtaattaatgtcataactgctattgactatatagaggagcatttatcagaaaagctggatttagatataattgctaatgctgttcattactcaaaatatcacctgcatagaactttcacaacttctgttggtctaacaatgcatgattacataaagcggagaaagttgacagaagcagcaaaattattggtattttcaaagaaaccaattattgaaattgcattgatagctggatatgaaagtcaacaggcattcacttctatatttaaagctatgtataaaaaatctccaaataaatataggaaagaacaagaattttatcctttgcagctaagatttgttttgaaaaaagataacctattttcaaagaatgtactagagttggaaaaagaaattaaacttgcaagtatgtctgacataccattatggatgaatttagtgagattagtcatagatggatttccaaatttgcaagaggaagaatatatatatcaattagaacagtatattttagaagaaagagctttaatattaaaacttaataatgtcgctattgcaaatatggtgtttaatagagaaactagaagtattgatttttttggaatacatccacagtatcgtaattcagacattgcacaagtgtttttgaagaaagttattgaagatttcttgatagatacagatatctcaattactacctttcgagagggtgacaaagctgatacaggacatagagatatgataaagaagttggggtttgcagaagcagagttgcttgtggaatttggatatcctactcaaaaatttattcttccttgtgtagaagaaagagataatagacaaaattaattgtagattaaatgcaaagtttaccacatattttttgtttgaattattttatatataagagtatttctgcttttaatgtattttgcttgtaagtgtacttatggtaataaatatagaaagatttagttttttaaaaaaagaactttaaagctaaaaagctaacatttaagttaaatagcaagaatgattaaaaactccaaaacacaattaagtataatgattcagtgtaagtacttaattaacaaaggaggatttaaatgtctgaaaataaacaagtagtaaattgcgatattattgcatccaattctaaacataatatgtgtgaacatgatgtagagttattaactttttttccagatgagattgcacatctaatagagataaataacaagctagacaatgcttttaagaaagctgaaaatcttgttgacaagcttgataaggattatatggacgctaaaatgtatatggtaaaaaatcgtggtgaaatagacccacatgaaatgtttcaaaatgaacaaggactaaaacaaatagataactatggggcttttatggtaaaagttcgagataagattaataaaatcaaagattctccatactttgctagaatagattttaggctgaaagatatggatgatgaatctaagtattatattggtagatttgcatttgattatgaagatgagcttataatacttgactggcgttctccaattgccagtatgttttatgattatgaaatcggaaaagctggatatgatgctccaataggatgggtggatggagaaataacaagaaaacgacaatttaaaattaaaaatggaaaattggaatatgcactagaaagttccattaatatacaagatgatattcttcaaaaagaacttagtcacacttcagatgaaaaaatgaagtcaatcatttcaacaatacaaaaggaacaaaatcaaattattagaaatgataaagctgatacactgattattcaaggggtagctggttctgggaaaacatctatagcattacacagaattgcttttcttctttatcgatttaaagataaaatatcagcaaataatgtaattatcctatcacctaataaagtctttggagactatatttccaatgtccttcctgagcttggagaagaaccattatgtgaattaagttttgaaaatatagcagaggtacaattagatagagttattaattttgaaagtgagaaagacccattagaaataaatgatgctaaatggtctgaaagagtgcgttttaaatctacacttgattttgtaaaacttattgatgattatataaaacaaatgccaaataagatttttattccaaaagactacacttttggaagttttacagctaaaagtgactggatacagagtagatttgaggcatataacagatatccagttaagaagagattagaaaaggtagctgaagacattcattataaatttgaatcagataatattatggaagaagatttaccaaaggtaaaaagtatacttaaaagtttgaatggaatgttgacaataaaaaatactcttacactatataaggatttctttaaacaaatgaatatatcaaacatgtttgtgatggcagaaaagaaaacacttgaatggtcagatgtatacccatttatatatattcatgctgcatatgaaggtatacaagaagataagattataaggcatattgttattgatgaaatgcaggactatacacctattcaatatgctgtaataaacttactttttaagtgtaaaaagactattcttggagattttggacaattggttaatcctaatcatactcatacattagatgatatgaaacagctatataatgatggggaactagttatgttgaacaagagttaccgttctacttttgagattattaatttcgccaaaaagattcaagatatatcttcattagagcctattgaacgacatggtgaagaaccggctttattaaaatgtaataacgagcaagatgaaataaataagataaaaatagaaattgaagaatttaaaaagagtgataatgcgactcttggtattatattaaagacagataatgacgctaaagctgtatatgatgcgttaagagaagaatatagtgttcacttaatatcttctgaaagttctagctttacaaaaggagtatccataacttctattaaaatgtcaaaaggtttagagtttgatgaagttattgtaccttcagtaaataataaaacatattatagtgattatgaccgcagtttgttatatattgcttgtacacgagctatgcacaaacttaagttaacatatgttggtacattaactcaacttataagcatgtagattatatcttatatgcatttattatcgtaaatataaattgggacaaagattcatcaataaatcaacaaaaaataatacttataaatttataaaaaatgaaagctataaattacatttgaaattttataaaattttgtgatttatagcttttataatattaatttcttttaaaataaagttaaactttaaatttatgaaataaaacaaagtagtaatatatatgtaatagttcttaattttttaatattagtattatattatctatatatttattgattttctaaggaaatctgatgttatagtgcaacctctttcaaacatttctagtggtgtaccttcaaatacgacctgaccaccgtttttgccaccatcaggaccaatatcaattacccagtctgcttgtttcaatacatccaaattatgttcaattataattacagtattacctttatcaactatatgctcaaaaatcaacataagcttttcaatatcagaaccatgaagccctgtagttggctcatctaaaatatatatagtaccttttttgttgaggtttttagctaacttaattcgttgacgttctcctccagatagtgtgctaagtggttgacctaaggtcatataaggtaaaccaacatctttcattgtttgtaagattttacatagcttcttttctgtaaaaaattcaagagattcatctactgtcatagatagtacatcaactatacatttacctttatataattttgacaaaacttcttcactatatctagtacctttgcaagcttcacatgtattaataatagggtccatgaatacaagctctgtaacaagtactcctttaccatcacaaacaggacaagctccctttgaattaaagctgaataaaccttcttcaacattattttctttagcaaatacttttcttatctcatcaaagaaaccaagaaatgtagcaggcatagaacgatttgtagctgtaactgggctttggtcgattttaataacatctttttcgtatttttgtgcaaaaacacgagagattaaagtactcttgccagaacctgctactccagtaacgacagtcataattccaactggtaaatctacatcaatatgttttagattatttatgcaagcatctctaattggaagggtaccttttggatgacgagagtcagtttttataggtaatgatagattcattgcatttgaagtaagagtgtttgctaaaagtaatttatcataagagccttggaatacaacatgtccaccctgagtaccagcacttgggccaatatctataacttcatctgctatggagataacatctttatcatgctctactacaaggacagtatttcctctatctctaagtttttttaatagctgattcatacgatgtacatctcgtggatgcataccagcactaggttcatcgaaaatataagtcatacctgtgagactgctccccatatagcgtacaagttttaatctttgagcttctcctccagatagagatgatgattctctatttagatgtaggtaagggagaccaatatcaatcattctttttaaaccatcagtaagagtctttattacagtttcagttcttttatcttttatttgtaacaataaatcataaaggtcagtaagttccatattgcacatatctgcaatcgaatatcctaaaatattacagttaagagtttctttatttaatctttttccatgacatacaggacattccttatctgttataagtctttctgatttttcttttgtgtgtttgctcatattgctaatatctcgatttagatatgtttgattgtatttgttaaaaataccctctatttttggattttcttgttttccatctttattttttgaaccataaagcaataaattatattcttcaaaagaataatcttttataggtttatctaaatcaaaaagtccagactctgcatactgcttccagtaccatgaattaggtttaaataaagagtcatttatacatcctgtattccatgaattttcaggatttataatagattcaatattgattactttaactctaccaatcccagaacaatttttacacataccatttgggtcattaaaagaaaaatatgaagttgttcctatgtagggttctccaattctagaaaataataatcttaatgatgaatacaaatcacttatagtgccaactgtagaacgtgcattgccaccaagaggagtttggtctacgattacagaagcagttaaattatcaatcagctccacctgaggttttctatatttaggtagcctatttctgataaatgaagaatatgtttcattcatctgcctttgtgattctgctgcaattgtatcaaatacgatactggattttccagaaccagaaactccagtaaaaacaacaattttatttttaggaattttaaatgatatattttttaggttattttgtgtaagtccttttattataatatttgacatgaatgttaaatcctttctgagtacattttagtaaagcaattatattatgtaaccatattataataaaattaaaatctactttcttgatatattctgctatgttatagaaggtatttctaaatttaaccaatcccatacaatctgaataaatgatagttgataatagataaaaaagtatataatagatactcgtaatttgataagtacaaagataattatacaattaaaacgacttgacatttaaaacttactattgtaatatttaaatattacaatagtaagttttaaatagagaataaataattacctcacaaactgaaaggaggacataatgatactaatagttatattgagtatattcatcatagcctcaatcaacataattatattaggtaaagaaaatataagagatatagttatccctttaactctatttattgtaagtgattttttatttttgtgtggaaatataatatgtaggggaggagtaatgctactatttataggtttatttgcaataccattgatgctaattgcatttatatggatttgtgtacatatgattaagctttactataaaaaagatttaaataaaagaaaaatgattggatgtatatttagtatctttataagtataggtactatatttattcctagtccaagtgaaagttttagatttaaactttatgaaaaagattatagtgtagtagctaaagctattttgaaagtttatgatgaaaaaaagttaagctctgaatctgtcttttatattcaatctgataaaaatgaattggagaagatattttctaaagaagtaataaaaaaaatgaaaaaactaaacagaaatttagatgtagttaaaatttctgggaatagaaatttagtctattttttctttggagctgaattacaatctattgatggtattgtgatttttaaagatttaaaacatgttaaaccaaagttagattttataaatagaagtattcaagctcctagattggagtatattacaaataatgtatattattttaaaggtgaactataaacttatgtagaggagatggtataaagtatgaaaagaaaaaataattttatttggatagttattcttctagttgttgtagctatgggagtatattatgtaggaagaaagcataacaacacaaaacaaaaacatgataagaatcatataaactctgaattaaataaatccaaagttgaaaacaatgataaaaacaaaaaagaaaaaattaatatggttgactatagtgactgttttgaaggtattagtggaggagctattttttataatactaaaaataaagaatataatatatataacaaagaattaattgaaacaagaaggtcaccatgttctacttttaaaatagtttcaactttaattggtttagaaaaaggggtaataaactcaaaagaatcagttatgggatatgatggtacagagtatccaaataaaaattggaataaaaatcttagtttagaagaggcatttaaggagtcttgtgtttggtactacaaaaaattgatagataaagttgatgctaaatctgtccaaaacattttagatgatttaaagtatgggaattgcgatattagcgaatgggaaggagatttaaaaaatggaaagggacatttaaatggattttggttagaatcttcattacaaatatctccaaaagaacaagtgcaaacaatggcaaaaatatttgagggagatacaaactttaaaaaagagcatattaatattttaagagatattatgaaaatagatgtaaatgataaaaacataaatgtatatggaaaaactggaacaggatttgatgaaaaaaataaacgtgtggatgcatggtttgttggtatgctagagcgtgaaggtgacacctattattttgctattaaatcagatgattccaataaagaaattacagggccaaaggtaaaggaaattgcaattaatataattaagaaatattatagtgtaagggaataaacttaattttatttgtaaatattatttacctatagtctgtaatatttattaaataattttactaaattgagtctatatagagcaaaactcctttagtacataaaatacttgctattgattattaaattgaatacctatagatttaaagttaataccttttaaagactatgtaatatattaaaagtataaataaaatatattgcatagtttttgttttatattataattttaaataatgtgcaaaaactaaacaatatttttaatagtaatttatatttgtattcatgtcactataatgtcattttaggttgctaaaatttaaccataaaggagatgattgtatatggaaatattaaaatgtgaaaatctcacaaaaatatatggttcaaatcaaaccagagtgacagcccttaataatgtaaatttatcagttcaaaaaggtgattttgtatccattgtaggagcatctggttctggcaaatctacattgttacatctgcttgggggagtagatagacctacatctggaaagatttatgttgaagatacagaaatatcaagtttaaaggaagaagctcttgcagtttttagacgtagaaaagtaggtcttatttatcaattttataatcttatacctacccttgatgttagaaaaaatatattattacccatgttacttgataaaagaaaggtggatgaggatagattctctgagattgtatctatattgggattatctgatagattaaaccatcttccaagtcaactttcaggtggacaacaacaaagggtatctatagctagaagtttaatctatagaccagctattttattagcagatgagccaactggtaatcttgatagaaaaaattcagaagaaattgtagacttgttaaacttatcaaataaacgatttaatcagacaatacttcttattactcatgatgagaaaatagcactagaggcaaatcgtattgtaactatggaagatggagtgattgtctctgaaaaggtggtgaagaaatgaatattcttcaagaatacaccttagactttgtacgacgcaataaacgtagtagtatagctataatgttagctatattacttactacaaccatgatgtcttctttgtgtggactgttgtataccatgtggacagattttataagactttcaattgagaaagaaggtaactggcatggtgaattgtttgactatacttatggaagtgacttaccattaattgaaaatttttcttcagttgatgatgtaatggtaaaaggacaatggtatgtaggcaaaattaatgatgagaaaagagattatataatttatagaaatgctacatcagagtattggaattctatgccagaaaaggatactataatagagggtcgtcgaccaaataatgctaatgaaattgcattatcaaaacaatattttgagaataatccaagtgtaaaaattggggataaaattactcttccaataggagatagaatcctaaatggaaagcctcttgaacccatagctcaaaaatcgaaaggggaaagttttaaaaaaatttcagagactacattgacaatagtaggaaaggtagatgtttccacttcatcagtaatacctgcatatacagctcttggatatcttgatagaacaagtataaaacctaatgatagtataactgtgtacttgcgatttaaaaatataagagacacatacaaggaacttccaaaacttgctaaatcattggggtggaagactaatgaatatggaaaatacaatcttaaatataatagtaattatcttttaaaaatgttagtcttttccccagaacagaaagcatctatgagcagtatatcaaaattttcaactcctattatgtatcttacaatagcaatttttacagtagctgtgtttgtaatggtgatttacaacgcgttttcactatctgcaaatgctagacttactcaattagggatattatctagtgttggtgcatcaccaaaacagattaaaatgtctgtagtgtttgaaggttttttgcttacaattataccattgccaataggtttatttttaggatggttattgtgtaataggcttatagtttatattaattcagttaattatcatactgatgttccagaagtggtatttacttatggtattcctgcttttctgccagcagttttacttacaatagtaacagtctggatttctgcacttataccagcacgaaaagtatcaaagatatctcctatagaagcaatacgacaaggagatagtgttaaaatcaaaaagtcgcataaatattcattaggaaagatatttggaatagaaggagaacttgcatcaaacgcactacgtgctcgtaaaaaatcttatcgtactgcaacaatatctttaacattatcttttttattacttacatgttttttgcatataattgcaaatcaagaaggagcaaaagctgtttatggaagtgataattataaggaccaaagagatatagcagtttatttggaaaatagtgaacctgtagagtctgctttcattgaaaaattagataatacagaaggtgtaaaaagttcactatattatcaaaaaatgtctgcttccacttggctgactgaaaaagatgcatcaaaagaacttgcgaaaaatggaggatttaaaagtatagtttcatctaaaaaatactctcctatagaacgtgatggcaagtttcgtataatttcaaatataattgggcttgatgataagagttttacagaatattgtaggcaaatttctgtagacccaaagttattttatgatacaaaaaatccaacctcaattgtatataataaggaggaagatattaatcgtagtacacgtagaaataaagtatatatagattatttaaatctttcaataggagataacattaaattaaatgaaaaagtatatgacgaagataaaggggattatacttacaacatgaaagtgggagctattacaagcacacttcctaaaacagtagatactagttcaaaatatacattaatgcaaatagtgccaatgtctatggtgcaggaaatatctaaaaattatgatgaagtaagtaggttacgttcaaataggctgataggagtatttaaagtaaataatcgtgaggacattcctagagtaagagaaaaattagagtccatttataataaagactatggttcaggagattatagtattgaggatgttttagaaagtgaaaaacaaaaggctagtggaataaagaccatgaatttaatagtaggctttattacaggtttattggctatgattggattatcaaatgtacttgctacagtgtcaggaaatactagaagtagacgacaagagtttgctatgttgcgttctgttggattatctccagaaggcataaaaaagatgcttgttttggaaggtttgttcttaggaattacaccattactacttagtattcctgtgcaaataggaatagtgtatgcttttctacgtataaatgaaatatattttatagagtatttaccatttgcacctatatctacaataataggttttactatattgatactttttattgtaatagcatcatatatgacaggatacaagcagttgaagaatgaaaatatagtagaatctataaaaaatgaaacaatataaacaaaagctatttgaacttatttaaaggtttcgatttaagactacttacaagtatagggatagttaatttgtttgtttaataaaaccttaaatgtaaatagaagtatattactaaaacaatagataacatagaatatagatatagctggattataggtattttacctataatccagcattttatgtgtaaaatttaattatgaatcttgcaccaccattatggcaattttctgcatgtagagtaccattttgacgttctataatagactttgatagagcaagccctataccaatactgtccttactagcatttttaccacgataaaatctattaaaaatatatggaagttcttcctgagcaaaccctttaccattatcttctatgataatctcaacatatagaggattttgactataataagcaactatatatccaccatcttctatatgctcactacaatttttaagaatatttaaaagagcttctaaagtccaattaatatcgatttcaaattctaccgaaggagaagcctcgatagtaaatgtctgatgtttttctcttaaagaaccttctataggctcaattgcataagtaagaagagaatgtacatctataagtttgctttcaaatattaaagtacttgcatccaattttgataatgtaagtaaagatgaaactagtctctcaagtcttgagatttgatttgtaagtctgttaatataatctatttcttcatctggacaattttctgaaagtaattgtgccataagtgacatagaagtaattggagtcttaagttgatgagcaatatctgcaagattatctgaaagagtttgtctttcttttaaagcaaattcttttgaacaacgaagttccccaactgttttatatatctcatcttcaaggtgagaaaattcatcttcacatcgtaaaagtacagactcttttcctaaattcacttcttctaagtattgagtaagattgtttattctactcagtttttgcttatttgttctatgtttgattatatatacaactgtagccattgttgaaattataccaaacgatatcactagaaaataaaaaaagtttttactccaaaatgtacttttagaatatccatgttttgataaaatttcatttcctgttttaaaatccttatcactagaatttttcagtgattttagtatactttctgtagacttaggattgtactcatatgatgcaccaagagccttagacagtacattgtattcattaaaagaagttatagttgttagaattacacttaataaaaaagttataattaagcagaatattataaaaacaactgtactgttgatatttcttggagttttcactagctgtcctccattctatatcctatgcctcttaatgtttttatacaaggtggattttttaatttttctctaagacgctttattgtaacagtaagagtgttatcatttacgaaattaccatctacatcccagagcatttctagtaactttgtacgggtcatagctctatttttattttccataagacttagaagaagtttatattctcctgctgtcaaaagtacttcaacattatctaaatatgctttgacttcaactttattcaagcttatatttccacatgtaatagtattgttagtatttgaatgagttcttctaagaactgcattaattctggattgaagtactgagagcagaaatggtttaaccacatagtcatctgcacccatatctaatccacgtataatgtctttttcatcatcacggactgtcaaaaatatcactggagtatcttctatacttttaacatattggcaaaactcgtatccaataccatcaggtagatttaaatcaagcagaattaaatcaatagttttatcaaaattttttttagcttcagcaatcgtattataacaacatacagtgtgatttttcttttcaagggaagtttttattccaaatgtaattgtatcatcatcttctaaaagaagtattttagccatttacttttagtcctttcagtaatttagttatttcattaactaagttattagttttatgtttaatattttttatgttagagatagaagttagagatagaaaaaattatcatttaagtatataaactttaatttataaacttaggtttatgctttaattgaatctattaaaagagcaagagttgtttcaataaatttttcctcatctatattaaagttgttcaggtatgactttcctgttacagatagtaaattaaaaaatcctgtaagtgtaaatattgatgaatacatgagagtaggtatttcaatatcatgcctaatacttctatcattttttccaatttcaaacattccttgtatttcatcaaacataaatttattaaaagaaaaaaacttttctttaaacagcatatcagtatccgatttttcagagtttacaataccaatcattcccataaggcataatagagaaggttctacagagtaaaatttatgaaaagcaaagtatgaaagttttattttttcaaaccctgttttgccttttgcactttctattttaacattatcccaaagtcttttatatcctcttaagacaacagcaaagaataaatcttctttacatgaaaagtacttgtatatggtgcgtttagtatattcaacttcttttgccaactcattcatagttgtattctgaacctcccatgactaaagtcacagggttcctgcttcatagaattttgcatactaaaatatgtcttactaattctccacaggccatccccgtagttcctacggttcttacataagttatttattttgaatcgttattagtcttaatccttcttttaatatatttatacttgcatttatatctctatcgtgagtttcattacaactaggacaaatccattctcttatatttaagttcttaacttcctcgtttttatacccacatttattgcatatttgtgaacttgcaaagaatttacctactttatacaatttgtctaccataccaattagccttgtattctaattgacgaataaattctgaccatgatacatcagaaattaagcgagatagtttatgatttttaatcatattctttacttgtaaatcttctatgcaaataatatcattctcttttattaatttagtagataatttttgtagaaaatcatttctttgattagctatatgttcttgaagtcttgcaacttttaatcttgctttatttctatttaaactaccgattgtctttctcgataattctctttgtaatttagcaagtttgtttaatgacttcttaagatacttaggattttctataaattctccacaacttgagatacaaaattctttgattcctaaatctaaacctgtctgattgttagtattttcaaatacttcaatatctacatcagtacagcataatgatacataatatctaccacttggttctttagatatagtagcattaagtattctaccttgaggtacttgtttatcccttatcttaaccataccaagtttaggtagttttatatgttgaccacaatacataatgttcccatttgtaaagttagttttatatgaaaatctattaattttctttgatttaaatttaggaaatcctgccttttctttaaagaatttttcatatgcgttttctaaatcttttaaggcgttttgtagtgaaaatttgtcaggttctttaagccactttaattctttttttaagttggtcaaatcagaactacactgtttataagtaaaagtttctttatcgtttttataaacttctattcttttagcaagatacttattatatacaaatctacaacatccaaaagttttgttaattaactcttgttgttttttatttggatacattctaaacttataagctttttccactactaccacctcactttacttgttttttctgattattaatatattttcttatctgctcctctgtattttctgatacagtagcaacgaaataactaggattccaaagatgtctccccataatacggatgtctgtatttgacatactatatgcatatcctctaccatgagtaacttccatttttcatcacctatcataatattaaaatatgcaattacttaaaacaagtattttgaaggttttttatatttatttttaaataacatatataagaaccgtaagtcttaacttttatcatttttgaggttgtcgttcacataagttcgctactacctatgcagttctcttatgaacttcttacactttcatgcaagcacagactatatcttatccttcggcattatccgttaaggtctacccacttccactaccaatagcttgtagtgtacttccctcaagaggaatagtcgttgaagtttctcctattcggagcttacctgctgattgcccattttaaagtacttaggatttaaccttataccatctaaccaattttttctactttcgtaactttcacacttaggtttatttcatccttatgttttagtttggttagctttaggggtttccagcaattcaagtagtattggataggtgttatcctatctctacatataggtttccctatatgctgactattttagctactaactcatgactaaagtcacgagtgtgcgtagctattttttaatcaaatccattaagacaaaataatttttctgccttatcaataatctcattttctctttgtattttttctttatctctttttgataattctgacatataaattattcctttctattgataaaaaagtatactgatggtatacttatgtaaatataatatttgtatacctatagtatactttaataaaaaataaaattaatatcaagtattataactatttataactttattaattaattatataggtaaaataccaaataaggggaatttatttatgaagataaaagaaaatgtattaatgttagatagtactcgtggttcaaattgttttattgtgttcgataaagaaattattcttatagacacaggtcttccttttatggggaaaaatataattaaagaattaaaaacacttggcattaaacttacagatattaagcatattttattaactcatcatgatgttgatcatatatctaatattaaattattgaaagagaaaacaggagcaaaggtatgggctcatgtagaggatataccttttattataggagagaaggatagacctgggtttaagaagtttattggaaaggcaatttccagaaggctcattaaggatgttgaaccttatggagagaatatgaagattgggaatataaaaattatccatactcctggtcatactccagggcatgtctgcatgatttttgaagatgtattatttgcaggtgatttagtcaaaaataagaatggaaatatagttccttatcctaatccatggaattgggattataaaaagatgatgaaatctataagagaattggataatttaaaatatgaatggatatgtatgtctcatggaactccttgtattaaataataaaaattaacatggattaatagaggcatagttgcttgtatgtatgataataatttacagcttctttttaatatatcatgtatatttgtagctgtaagcatatttataacaatacttataattttgtattttaacatctataataatagttttagctttgttaactatgaaatttacttaaagaagtaaatattcaagtaatagtaattattaaataagataaaaaataaatggcagatgaattaaagtaatttctaccatggaaaatacttttgagttagaaaaaactctattttagagtatgaagagatgaagcttccgaagaaagcaatatctaaagtacatgttcgaaaggataagtactttttggtgcctgcttttagcaggttatttttattttaataaaaataaaatcaaatgattattttatccttattatttaagactcttcactagaaaaagcaactaatgtatattaaaataatatttagggagtggaaaaaatgagattagaatcgttagttaaccaaagttataatagtttaaatgaaaatgataaaattattattaaacaaatattgatttgtcaaagagaataccgtaatttttcgtgtgaaaaaattgcaaatgaatgtaatgtttctagagctactttattaaggctttgtagaaaaattggattagattcattctctgatttaaagtatttacttaaaaataatcaactagaatttgttaataatgataataattttcatgatgtttgcgagaattatcgactattaatgaatgaattacaaaaaatatcatttcaagatatttgtaaaataatatatgatgcagaaacaatttatatttatgggacaggtaatgaacagaaaagtttagctcaagaaataaagagaatatttctttcagtaggtaaatgtgttattgacttatttgatataggtgaaattgaatttatgagagaatcatttcaaaaaagtgatttatttattatcatttctttgtctggagaaacaaaatcaggaattgaaattgcaaaatttatcaacaatcatatacatacgatttctttaactaggcttgataataatacaattgcaacactttgtgagtataatctgtatgttgaaactcaaaaacttgatacattacaagctatatcttatgaagtcgtaggagcattttatgctctattagatttgcttcatatgaattacatagagtatagaaggagaaaagaatgaaaattgaaggacttttcaataaatattataattcatttacagcaaatgataagtatatctgtgagtgtattcttaatcataaagaagattgtattaaactttctatagatgaatttgcagacaaataccatatatctacaagtgcactttctcgttttgctcaaaaactacaattacctggatatagtgaattaagagttattatacgcttaaatgaaacagaagtagaatataaaaatcaaagtaaacaccaattaatggattgttataataaggtgatagatgatatagagaagaaggattgttcgattatgtttgaaagaatgaaaaaggcaaatcgtataatcgtctttggagaaggttattctcaggaaagagttgttaaagagatgaaaaggattttcttaccaacagggaaaattatatatgatgtttatggttatgatatgattcaggcgcttaatcattttataaaaacagatgatatgattttctttatctcattgaatggagatacatctacaattattgattttgctaaagaaatgagaatgaaaggaacttatatggtttctattacaaaaatgataagtaatcctttagcaagattatgtgatgaaaacctgtatattcaatctatatctatttctgtagataaacaactggactacgatgtaacaacaccttattttattttaattgaactgctttatattaaatacaagatgtatttagaaagtgaacatattccccgaaagtgaaaatttgtgctaaaaatgaacatattttttaaaagatatcaaaatattgatatctttttttttgaatgctattatgattttgatagtaagaaaggaagatgaaattgtacaaattattaatacttgatatagatggtacgcttagggatgaggtatatggaatcccagaatctgcaaagcacgctatacgtttatgtcaaaagaatcattgcagtgttgttatttgtactggaagaagtataggtacaatacaagatgatgttttatcattaggggttgatggatatattgcaggaggaggtaattacattcaatatcatggtgaattactttataatcaatcttttaatcaaagattgataaaggaagttgtttgtttgttaaaaaagagagaagttgctttttcgattgagagtcaggaaaaagttttcatgaatcaaaaagccaaagaaatatttgaaacaatgaatcagttgaaaggaactaattcttgtataaataaacaacatatccaagaaaaaataacatatgaaaataatattgaagagtataagtcacaagatgtacataaaatttgtttatggtcaaatgaaaaggtatttgacgaagtgaaagatatactacaagataaaatggaattagcacagagagatatttctagtcagtattatgaaattattcaaaaagattttcataagggcaaagcaattaagagattacaagaaagattaggggtaactcaaaaagaaaccatatgttttggtgatggtcaaaatgatattgtcatgtttcaagcatcagacgttacaattgcaatgaaaaatagtcatcaacaacttaaagatatagcgacatctatatgtgaggacatattcgataatggaatttataaagaattaaaaagaagaaatatcatataaaaaggagtaatttatggaaaagaaatggtggcaaaaagaaatcgtttatcaaatttatccaagaagctttcaagatagtaataatgatggaattggagatttacagggaattatttctcgtttagattatttaaaagatttaggtattacatcattgtggttatgtccaatttttaaatcacctatggacgataatgggtatgatattagtgattatttagatattgcaagtgaatttggaagtatggaagatttaaaagagttaattaaagaaagtaaagatagaggaatcaaaattatattagatttagttcttaatcatacaagtgatgaacatccttggtttcaagaagcattaaaaaatccagaaagtccttatcatgattattatatttttaaaaaaggaaacgatttaccaaataactggaggtctgtttttggtggaagtgtttgggaaaaggtagagaatagagacgaatattattttcattcttttggtaaaaaacaacctgaccttaattgggaaaatccaatattaagaagtgaactttaccaaatgattaatacctggtctcaaatgggagtggcaggatttagagttgatgctattacatttatcaaaaagaatttaagttttcaaagtttagaaagtgatggtgttgatggtcttgttaaatgtacaaaaacagttagaaatcagcctggaatagaaaaaatgctttatgaattaaaagaaaatacgtttaaaaaatatgattgtatgactgttgctgaagcagcaggtattagctatgaccaactaggtgattttattggagaagatggtttcttttcaatggtctttgactttaaacatgctgacttagatgttgcttctggtagtgagtggtttaaaagaatttcatggacaattccagatttaagaaaatgcattttagatagccaaatgtatgttcaggaacatggatgggcagctaattttattgaaaatcatgaccaaccaagagctacaacaaagtatcttttgcaatacgaaaggaatgatgatgcagtaaaaatgttgggagcaatgtatttctttttaagaggaacaccatttatttatcagggacaggaattaggaatgacaaattttaaaagagataccataaatgattttaatgatttatctagcattgaccaatactatcgttcaatagatgaaggttactcagaagaagaagcgttagaatttgtgaatttaagaagccgagataatgcaagaacgccatttccatgggcagataaagaaaatgcaggtttttcagatgcaacaccatggttaaaggttattgaaaattataaagatattaatgcacagagtcagattaacaattcagaaagtattttagaattttataaaaagatgataaagttgagacaagatagtaagtattctgattgtttgatttatggttcaatagaacctattgatatagaaagtgacaatgttattgcgtatagaaggcaattagatttggtagttattgattgttattataatttttctgataaacttgtagaaataaaaacagaagaaaaatatgatattgtattccaaaatttagatgatataaatctactaaataaaacagtgagtttgaaaccatttcaagcagtattattgaaagtgaggtagaaaaatgaataaatataataaaatagcaaatgagcttattgaaattattggtgaaaataatattatttctattacacattgtgccacaagattaagggtgatggttaaagatagagaaattattaatgataagaaagtggaaaaggttaatgaggttaaaggtgttttctttacttctggacagtatcaaattattctaggaacgggaatagtcaataaagtttatgcagaagttgaaaaaatgggattgaaaactttatcaaaaaaagaacaagatgaattagttaaaaataatgaaactggatttaagaaagttatgagaactctagcagatatatttgttcctattattccagttattgcggcaacaggattattcttgggattaaagggttgtttgtttaatgataatgtacttggattatttggaatgtcttctgcaaatattccattgtatattcagacacttgtttcggttcttacagaaacagcatttgcttttttaccagcaattattgtatggtcagcatttaaggtatttggaggaacacctgttattggacttgttattggacttatgttagtttctccaatacttcctaatgcatattctgttgctgacccatcaaatgaagttgaagcaattatggcatttggatttattcctattgtaggctgtcaaggaagtgttttaacagctattgttacagcatttattggagctaatcttgaaaaatggttccgtaaacatatgcctaatgtattagaccttattttcacaccattctttgttatgctaataacaatgttagttattttgttaggtgtagggcctataatgcatacaatagaattaaaaatggttgatatcatcagtttattgattggtttacctttaggaattggaggatttattattggatttacatatccattagctgttattactggcttacatcatacttatgtaatgattgaaacatcactattagcaaatacaggatttaatgcacttattactctttgtgcaatgtatggatttgcgaatattggaacatgtctagcatttatgaaaaaatctaaaaataatcaagttaaacaaactgcagttggagcaatgctatctcaactttttggtataagtgagcctgttttatttgggattcagcttcgatataatttaaagcctttgattattatgtgtgcatcttcaggtttaggagcagcaatattatcaattttacatattcaatctaattcatatggattagcagttttaccttcttatttaatgtatatctatgatggatataatttaatcacatacttattagtatcaatatttgtggttgcattctgctttattgtaacatgtttatttggagtgcctaaagaagctataaatgaagatgaagacgaagaattagtgtttaatgaaaataatgaaaactttgtgtctccagctaaggggaaaattgttgcattagaaaatgtaccagatgaaacattttctaaaaaaatgttaggtgatggttttgctattgatattatagatggaaaaattgtttctcctatttcaggtaaattagaaacagtattttcaagtggacatgcatttgggattaaaggaactaatggagaagtattaattcatgttggaattgatacagttgcattaaatggagatggctttgatattgctgttaaacaaggagatatggttaaacagggagatgttcttgttaatgttgatttaaagagaatacatgaattaggaaagtctactttgacaatggtattgtttccagatggtaagaaggtaaatattttggatataaacaaggatgtaaaaataggtcaaagaatatgtgttgagtagtaggtgatatgtaatgactacaaaagaagattatcaagagtaattcaatctttttaaagtatgagaaataattcataaactctaaaacaattaaagaggttgtctcaaaatagagattgtactgcacccaaattgttgaaatgatgaaaatatatttaacttcatacaaaaaattaaatagtggcaacaattgaggatgtgagggagagttgccactatttgtatagggtattatattatgtttttaagctagttttactatcttctatgtttatataataagccttgtatatgaatttaatcgataattaatatgaaaattatgtgaattttttagaatgtacagtaaatatattaaggattatagatttttttgtcatttaatatggataatgttatcttagatgctgaactaccattagaataatctttgctttgaatatttgtagcaaagaaataagtattttcatttttttccacataacctataaaccaaccatttacatcttttccatttatattagcagtgcctgttttaccaaaaagtgataccccatccttttttgatattaacaatgaatcttttactgtttctatatttttatcttcaaatttaaacttatttgtataaaaactttcaagtaattctacctgttcaataggtgatatttttaatgaagattctagccaaaagtttgagataccacctgaaacatcataattgccatatccaatttgcttaagataagtttgtatgttttttagccctgtttttttgtctagagtctgaaagtaccagtttacggagttttccatagcagaaaataagtcttggtcttcattccaagaactattagaatgatgctttccatcccaagggatatgtgaattatttcttgttattatcccattttccaatcccaataaggcactataaatcttataagtagaatttggagaaattcttgttttacttttttctttattgtaaatatgatattgcttggattttaaatcatacataacaaaacttccatcaaaacctttaaaatactgacttaagtcctcgtacacagtttgttcatttgtaggtctatatttttcgttgatatctgccataatagatagtttgggaatatttccaaatacaattaaagctatcaatgtaaaaattaaaatgcttttgaattttaacgtatttgattcattatgaaaatccattatcttcaatagtcgcttttttatttgtttttttgacccaccaatatctgatgtaagtgtaagatttgatggtcttgaaatattatccacaaagtttattagagtttgtccatattctatatgactatctttatcaagcttttttaaaactgaaatatcacatgcaatttcacggtctatacgcatttctttaaatgcataccatacaagaggattaaaccaatataatatttgaaggaagcacattatataatttatcagtatatctttatttttaaagtgttgtaattcatgaagtaagatatattttatatcttttaaagataatttagatatagacttatctggtaatataatgtgtggtttaaagtatccaaatgtaataggtgtatttataataggtgatttgcatagtataaaatccttatttataccaatatcttttttacacttttcaaatataaatactatctcctcatctcttaaaatttgtattgattttttcatattttttattttaatattgcaatgaatagtaatagctatcatgattaaaattccaattatccatgatattagtaataaaatatttaaactatcaaaattaacttggtttagggatactgaaaaatcgtttaatgcatttgagttattaattatagaatttggactattttttataatagaagtcctattagtactgcttccaagttgattaaaagtatataaatagttaaatacatttccaagattaatatatttaagagggacaaatggaattattaacattataagcaatataaatccaatattgtattggtactttgcagaaatatgttttttaaatacttttttggcaagtaaaattataacaattaatattgataaggttaatgtactgagtaaaaatcgtataaagaatggggcatacatatttatttatcccccttagtcgtccttttatttaagatttctctcagttcctcaatatcatcttcagatagtttatcattttctaaaaagtttagtaccatagaattaagagtaccattataaaaacgatttaaaaaagaactactttctgtagctacgtattcttcttctttaacaagtggagtataaacgaatactctgctatttttttcatatgttaaagctccttttttaactaatctcaataacattgtttgaattgttttaggactccatgtacttgtttctaccaacttttcaattacttcagtagtgctgataggagcatatttccaaataattttcataacttgatattctgcttctgaaatatgtggtaactttttcatactatacctccttctacttacatttgtaatacataaagtatattatcattaatttagtttgtcaattattaaaaataattcatttatagttgattaaataagcacatgtagttaaataaaacttttatttaagctgtgtaagtatagctttaaataaatggtttatattgacagctaaaaatatagttgatatacttattgttgatataacaactaaaaaggagatatagaaatgataattacagttataaatggaagccctagaaaaaatggagctacatcaaaagttttaacttacttgtataaagatatagaaagattaataccagatgtaaaaattaattattttgatttaagtgaggtaaatccatcatattgtattggttgtttaaattgttataaaatgggcaagtgtatcaatcaaaatgataaagtagagtatattcatgatataattactaagagtgatggtgttatatttggtagcccaacttatggaagtagtgtaactggacttttcaaggtgtttacagatagagcacatatgatgcttgaaagattattgtatcgtaagccatgtatagcagttactacatatgaaaatgcacgtggttcaaaagcaatttcttttataaaatccatggtcttagattcgggaggttatgtttgtggtagtttatctataaaaactggatttaatcaaaatcctataactgaaaaagtagaatcaaagatacaaaaggtatctaaaaaatttatttattgcatagaggaaaagaaaaatccacctgtgctttctcaaatctataattttattgctataaatgctgttttaaagccaatggcttttaaagatattgagcaatataagggaataattgatagatgggaggagcaggggattatttaaatggaggtaaaatgaaagattttgagaaactatatgaagctacaactaagttagtaagtacttcgttaaaagtaaaagatgatttaaaaaagatgtttaaacaaaatggatatgatataacaactgaccattatgcgttattaaggtttctatgggagcaagatggaatttctcagatagatttatgtgaaaaatcatgtaaggataaatctaatacaacaagaattttagacgttatgaaaaataagggattaattgtccgtaaagtagatgttaaagatagacgtaagtttcaaatattcctaacagatttaggtagagaattagaagaaccattaaatgaaattgcaagtatatatgcaacagagacatttaaatctatctctgatgaagaattgcctttgtttactgatattttggatagaattggaaagtaaatataaatcctattttaagagactttttaactattgatgatgtagaaatatagaaagagggataagaatgaatagtaagatttattatttttctggaacaggaaattcgctagtagtttcaaagattttaaaagaaacgttaaatggaagtaaagaagttatacctttagctatacatagaaaagaaaataatatagacataaatgaagatatattggtaattgtttttcctgtttattttgctgatgttcctgatataataaagtcttttgtagagaaattaaattttaatattaatactcatatatatgccattgccacttgtaatggggtagctggacatagtttatttactatagataagttacttaaaaaaagggggaaaaaattatctgctggttttttaatcaatatgcctggaaatgctttgataacaccttcagatgttgaagaagaaagattgaaaaatcagactaatagggtagctgagattgcaaaatgtatcaataacttggagattggaaatatagaaggaaaaaacaatttaaagtcacatatagatagtgttgtacttcgtttagtaggtaagaatatgcaaattgcaactactaaattttttgcagaaaataaatgtaatggatgtgggacatgtaaaagggtttgtcctgtagagaatataagtatagttgataaaaagccaaagtggggtaatgagtgtgaaagatgcctagcttgttttcactggtgtccaaaagaggctattaatgtaaaaaaatcttttttaacgaataggaagaagtatcaccatccagatattactgtaaaagatatatttttagataaatagatatatttgacttgtattaataattgttttattaaataaaaacgttagagatataaaagaaatataaagtaatcttgtaaagagtaatgttacctagactaaatggaatagagattaaaaagaacaatataaataataaattatgttaatagtatatagttacactaatataaaataaaagtgcctcataaatagaagtttttgaggcacttattatttggctaaattagtttttattattttgtaatatcaaccgtttataatctcgaacattttttttatatcttctgatgccatttcaaattttgatttttcaatcagtatgtttccaccagtcataatatatgatggaaatactcttaaattatcataataaagttcattattacgaagtttatatgttgaaatggaagggatgacattcttttttatatgctttttagtaatcatattaaaagatttttttgcaacatctcccattaacattactacctctaggtttttaaataatttaatttcttcttctaaaataggcatatgtaatttaattgtatcacgagttattgtatattctgatttaggaagttttactgcattagttatatagatacccatatctaggatatcatttatgttagatacttctattcctgcactgtcaaataaaggaatagtagtttttaaataatcagcatctttatctacactataaaaatcgtcattggtgttagttgggacaacctcattaatcattatagtttttattttgtctgtttctattgttatattaggaaggtaggatattattctgttgtcatcaaaaagattgttctgtttaataaattcacttaactttgattttatatttattttcatataacgagtctccttagttttaagctttaaattactataaaaagctagttttaaagcacacaattttgaaaatatagtagcatatttgaaagtataataacatataaaacatgacaacagaatgtcatgttttataaataatctatcgcaacttagaatttattagagactctgcctgttcataatcgtctttatgaacataaattaagtactcataagagaaatcttccttttgacctaaattgccaagtgttatttcattagaaaaaggttttttagagtaagcattatttttcactttatacttatatttaattttatttactgataatatattgcatatctcgttaaatctatttaaagaatatcctcggaaaagctcagttctatttaaaatcataaggaaaacctccttttaaaagtaatatattgaaaagcataggagaaatgtactataagttgttataaataaaaggtagcaaatttaaattgatttgtaaagtttttaagagtattatattagtgataaaataaataatttttataatctaactaataacaatttaaaataggtaacttatgtaagaatcgtagggactacggagatatcctgtagagaattaataagacatatttaagtatgcaaaattctattaagtaggaaccttgtaactttagtcatgtgagatttataaggatatttaagtattgaaaggagagtttaattgaaaaaaatatctcaagaaaaaataagtacacatatccaagaagtaccacaggaaaaaattgaacagtggaaatctttatatgaaaaatataaaagtattttaaaagtaaattctaagtctgttttagaaataatagagtttttaaagcgaaaatatgtaatagtagaagaaacttcagaggaatttaaacatgtagttatcaataatattaagttaaacaagcctttttcacaaaagatttccagtgataaagaattaaaacctattgtatttacaattccaaatgaaggaaatgcaaaaaaattgtacgatactcaagaggaaacttatagtggctgtaagattattgtaggtatggaatttgaaacaggttgtgtttttgtagaaggtagtgatgagcttaatgatgaaataacttcttttaaaggattagataaatatgatataagtaattattatttagtagcaaactatattagatgtctaaagaaatataaattaatagattagtgtttgattaataaattagtgcttgatttaaggattatagagtaaatttgaagttagtgtgataatgaaactaagcttaaatctaatataactgtaaaacataaacttaaatagagttgccaaaataaaattggtaactctattttttattttaatttttattaaaattagtaggtgttatagaattgttattttttcatgttagtattctcttagtaatagatttaaggtattacaagaagggagaaattaatatgaaagatttaattcttgaaacaaaaaacttatcaaaaagatatggagaacaaatggcagttaacaatgtttctctacaaattgaacgaaatagtatatatggacttttaggaccaaatggagcaggaaagtccacaacacttaaaatgcttgttggtcttcttcgcccaacagatggtcgtattatttttgatagaaagccttggaaacgagaatctcttgcaaaaataggttctttaatagaatcccctgcattgtatggaaaccttacagcagaggaaaatttgttagtacatacaaaaatattgggaatacctaaagataaaatttatgaagtgttggaaatagtaaatttgaaaaatacaggtaaaaagagagcttcacaattttctatgggtatgaaacaaaggttaggaatagctattgcacttttgagtgacccagagttgttaatactagatgaaccaaccaatggtcttgacccctttggcattcaagaattgcgtgaattgattgcttcttttccaaaaaaaggtataactgtaattctttctagccatattctatcagaggttgctcaagttgtagataatataggaattataaatggaggacgactactatttcaaggaatgcctgaccctaatgaaaatctagaagaattttttacagatgttattcttaaaggaggacaaaacagatgaatgctttacaatcagaacttttaaagtataaaagaacatttatgggtaaacttattgtttttttcccagtgtcttttgcagcatatgcatttataatgcaatcaacactcatgcaaaatccattatctcaaacaacttcttgggcgtggcaaagtcttttagcattaatttttaactggtggtcatttttatttctgcctattggatttgcattgtttgctactttggtagctttccaggaaaaaaaagctggaaattatcgtgctttacgtacacacaatgtgtctcctatgacactttggattaataaagttatagctatggcagtctacagttttatttcaacgttagttttaatagtcgtaacaattataactggtttaatattgaaagctggtccagttccttttggacagattataggggcaagtattgtatgctgggttgtttctcttgctatacttccacttcagctatggctagctacatggaaaggtatgttcctaagtatgggagttggagctttaggtatgatatttggtgtccttgctgcgacaaaaccattttggattgcagtaccttggagttgggcagttagaatggtatgcccaatcatcaacatacatcctaacggtactatattagaagctggagacccacttttgaatacttcagtgattcctattgggattgttgtttctttggttgtgtttatagtattaacagcgcttactgcagcttggttcaataggagggatgacaaatgataaagctattatcatcagaatggcttcgagcaaagaggacagctgtccagtggcttactctttgtatgcctattattttttcattatgtgtggttttttatctcacaactaaatctggaagtacacaagaatttgcttttgaaggattttttacagtatggactgtattcatcattcctattggagtaggtattttagcaggatttatagtgcaggaggaagagcttgctggaaattttaatggttttttatgtgtaggtatttctcgtgttagattatatctgggaaaatttctttttcttctgttttgcctaactatatgcacatttattgctacgttgatactttgcataggaatgagtattgcagtgccatctggagcaacaatatggttattcctgtcagcagcaggacttgtggtgattgggacacttccactattagctattcatctttgggtgagttttgcatggggtatgggtgcatctattggtattagtatcggtggaattttgatggcagcaatacttggattaactagcgttggtgaaaaagtatgggcatttgttccatggacatggccagtaaaactaggtatgcttccaggaatttattttattaaagaagctggaactatttcaactgaggcattttactctaaagtgatgcaaacagctagtatagagcttatagtagtagcaataggtttgattatattcttgataggaggcgttatttggtttaaaatgtgggagggaaggaaaagttattagtagacgaatattgttttaatactgaccttcccataagagaaaggtggtgttatattgagtaaaatattgattattgatgatgaaatggacctagtaatgctacttgaggatgaattgaaggcaaaaggacatgaagtgttgatagcttatgatggtcaggcaggtatagagttatcaaaacaggagcctgaccttattatactggatattatgatgcctaaaatgaatggatttgaggtatgtcaggcaattagagatgatgttttatgcccaattatatttttaagtgcaaagcaatcagaaaccgacaaaatcaaagggttgacctttggaggggatgattatgtaacaaagccatttggactgcgtgaacttatggcaaggattgaagctaatctgcgtagggaaaagcgttcacagtatatcaatgaagagaacaagagatctactttgtattttgggaagttatgcttatatatgaaggaacgtgcaattaaaattgatggtaagaatattgatttaacaaaaatagagtatgatattgttgaattactagcactccatgcaggacaagttttctcaagagaacaaatctatgaaaaagtatgggggtgtgattctgaaggtgattcctcaactgttgttgaacgagtaaaaaaaatacgagctaagttttctgctgtgacaccagaaaaagaatatatttccacagtttggggtattgggtataagtggaataaaatgtaaagagagagaggttattaaatgaaaaatcaatcccttattacccaatttagacatacttttatttttattataatagccagtatagttgccacagtgattacttatgtatttgctctctatttgtatattcattccttaaataaggatatctatccaccaaactattatgagcgacaagttcctagaattgaaaaatacatcaatgaaaaaaacataactttgttatcacaatcgaatgaagaaggtttaaaaagaacgattcgtggggatgatatgccatatcaagttgtggataataatggcaatattctatatggtactaaccccaaaaaactatttaaaacaaaagaagaattatttaataattttatcaataaaactgttcgtaaaggtggttatatccatactgttccaatcaaaggggataatggaaagattgagggagctgttattctattctatcaagtcaaaataacctttgcaaatagtagagggagatttgtatttgcagttattataatggctctgttttctccatttatatatatcgtgggttttactagatggctttctaagcgctttgtaaagaatatcaatcaaccattacatctattgattgatgcgtccaagaagataaaagaaaaggaccttgattttgaaatcgactattattcagataatgaactcggtaaactttgtagtgccttttctgaaatgaaagacgaattaaaaggttctttatctgcgcagtggaagatggagcaggaacgtgttgaaatggtggaagctctagcacatgatttaaaatctcctctttctattattttgggatatacagatgcacttattggtaataatacagatgacaatgaaaaacttcataggtatcttacagtgataagagaaaatacagaaaaaagtgctgctcttgtccaaaagatgcaatatacgtctgacttagaaaagtcaaatatacaattaaatcttgttcctataaatttacctgaatttttgaggcaaaaggtgcaagactatgaattacaggctcatcaaaaggaagttgaacttatattgaaaatgaaggggaatatacaatccccaattcaaatcgacgtggataggttgacacgaatttttgataatatcatatccaacagtctgcaatacactccatcaggtggtaatattagtattactgtaaaggatgaaaaaaattgtatttcttatgagatttgtgattctggtagagggtttagctctaaagatttaaaaaaggctcttgataagttttatcgaggagatgaagctaggcagacaaaaggtggacattctggtcttgggctttacattgtcaaacaattagtggaacagcttggaggttctgttaaaatagaaaattcaaaatcaggtggagcatgtgtgaaattttggcatagcatttaactatatattttaaattaaaggggagtgtctcaaagcgaaatttttaattcgtgaggcactctttttttgtgaagttaaatatattttcattattccgacaatgaaaaaaggcttatctctattttgagacaggccttttttaaagcttatattatagttaaaaagatttattagttagatttgaaagaaaatagagacagtcattgataatttaatttatattattatctgtaaaatagttataaattgatatctatacagtcaattatattcatctttttaacttttcttaacggaataagagtagctataatacatgcaagtacagaaataatagtagcttgtaaaattgaagtaattggtatattagtgaaatcaagcttttctatagttgccatgtttataataatagcactggcatacccagcaattgaaccaaatatagcagcaaaaattccataataaacaccttcccataaaaacattttatataagctaatattactcataccaatagctcttttaactccaatctcattagtcctagtatttatatttgtatgagttgtgttaatgatgtttaaagtaccaatcaatcccacaaataatataactgcccatgctagaaattctatttgtttaaaactctctttaagttgcttatctgattcaatatatgatatccaatgagagccaggattattttcacaaatctgttcaatagacaatcttatttgttctaattttgatttatctttagcataaatatttatctggttgaacttgtttttatttgtcaaggtgttataaacagaattatatacaataacatcaacaccatttatccagccattaccttgtaaaaagaacattttatctactgtactatatatatctagttgttttttgttgattgtgatactatctttaggttttaaatttgtatgtctagtttttacacctggtgtagaaatagcaatcggattttttataaaacagatagaaccatttttaaagtcttctagtatagaatctgtaatagaaggcattaagtcttttaaagtctgctcgtcaattccaatgatttttaacatctcaccactattttcaaaatttatatctgtatctatttcaccctgtttgtattcagagtactttataaaggaagtgcgattgacgtttttcattttatctattttatctagtgttgatttatcaaaaccagatatttcatttgttaaggaaaaatctccttcttttaaattgcttactgacctagatacatctaatacattagagaactcactcaatgcaacgaatactgttatactcataaataatgatagtatagttattatagttcttcctttatttctttttaagtttagccatgctagatgtctttcaaagttttttattgctttttctcttttaatttttcttttgattttggtagtactaccagccatagcaattttgggagagacacgtgaagcatatattgctgatggtaatgctgaaataaatgaaaaaatcaaagatacattagtgcttaatactaatgggaacatatatgctgttgtatttttatgtataagctcagtaatttctttattatcatttgctagaagtatatctggatttaagatattagtgaccattccagttatgcctttagaagagataattccaattacagctccaataggtatggcaacagtacataaaattaagatttgtaaaataactatcttatatatctggtttggttcagctcctattgctcttaaacatccatactctttaattttctttgtaacagagatttttaaaatattatagattacaagtccagaagccagtaaaaccaataaggcaacaaataaagataccaatataatcatagatataccatcactattagaactattttcatctttttcaaactgtatcttaagagcatttaagtaaatccaattatattgaattgaattgtgagaaagatttatttttttagctaattgatttactatttcttgaaacttttcttgctgttttattttaaaatccaaagaggataaaatatatctcttaggtaatagattttctgatgtacctttacctacaataccatttactataccacttacatatcctgtataatcatcctctaaaatgccactcaatttaaagttagctgtgtaattatatggtggtatggtatcatttaaaagtgaaatatctaaattcataggtatagtcactcctagtcttggttttatacccataagctttagagtgttttcatctaaggctatttcgtttttatctttaggcaaatgtccagattttaatttcattaattttgggtagttagaaagtcctgttttatcatactcttttacaagtacagagataccagaatcctttattttactactgccaatagttattgaagtaccagcttgataaactctatcatctttctttatgtcatcaacttgatttttagtaagttggtgaaaggatacatgtctatcaccattaaaagaacgggcttgttcaattcttaaattttgtaggataccaattgactgtccaaccacagttgtcataatagttgatagtactattgctataatgatgaatgtagtcataagtttctggctttttaattcttttattgaaagtgaaaggtaattcttcatttctatttcacctccataagaacaccatcaataattgaaatttttctatcagcaagttttgcaattctatcatcatgagtaattaccactaaagtctttccaaactgttttgaagtttttataagaagattcataacttcactgccacttttactgtccaagtttcctgtaggctcatcagcaaatattatatctggttttgcaataagtgctctagcgattgcaactctttgttgctgaccgcctgaaagttcatggggaagatgattgagtctatctgcaattccaagtaatgatgaaatttcatttaaatagtctttatcaggttgttttttatctagaagtacaggcattgaaatattttcagatgctgtaagaacaggtaaaagattaaattgttgaaagacgaatccaaaggattttcttctaagtgcagatagttctttttcagtgtgtttatatatatctttatcatcaagtaacacttgtccagaggtaggattatctaatccacttaaaatatgtaaaagtgtgctttttccacttccagaaggtccaattacagaaacaaattcacctgagtttatttttaaatttacattattaagtgctataactttattgttattagaaccatatatttttgataattgttttgcttttataatcataaaaaacactctccttttctatataagaagagtgtaagttttaaaactcaattttttcccaacttttagcttaaatctaaaaagtcttcactatttacggataattcgcagtgctgataagcagtttcagtatcatttttaatttaaaatgtaatttatgcactaaaggctttacaatacaactctattgctttaaaactattttacacataaacttgtggataattttttatgttttacttcctcattattatataaattatttttgtcacaaattctaagttgtcacataaatatactttttatatcacgatttaattcttttgattttatcataattgctatttcttcaaaagaagaaagaaaagccacgatacatatcataattcctgcaacatcaagaccaaagcaaatatagagtaatggaaaagcaaagatagaaattccagtgattttattcatcaaagtatgaagcgatgaaaatgtgcgatacttaaaaaaaccaatactgtaactaatcaaccgtaataatgctattgcaacaatacaccaccatagatacatgggaagagcaatattttttccgacagtaaccaaaattgtaaccgcaaaaatgaaatcagcaatactatctaactttgcacctattccactttgttgtctcaactttcgggcaataagaccatcaagtatatcactaattccacaccaaaaataacatatccagaaaggcagtgaacagaatgtagaactaagcattagcaatgcaaacacaatacgagagaatgtaatattattagcaaaacttttaatataatcacctccaaaattctagtttcatactattctacatatttaaatatatatttctattattgtttcaaatgccttttgccaaaatattataattgaagcaactcttacaacttctacaaaatagtatatatattggttgtaaattgaaatacattttataaattctaaactaacaaagcttatataagaacaatgaaagcttacaaaatcattttaatttcttgttgagaatttagcagtaattttagcactgttagtagaattattttcaatagaaatagagccaccatgtttttcacataatatttttgagatatgaagacccataccaaagtgtggattgctgtcatttaaagtcttatctctatagaaaggtcttaaagctaattttagagattccttactaaatcctataccatcatcttcaattacaaaggtaaggagttcttgttcaagatatataagtatggatacattatttctagcatatctaaaagcattcgatattatattttcgacgactctaagaatgatattttcatcaaaaaatagatttatattatttatttgacttttaagtgtaaaagattttccttcttgtttagcaatgatagatatattttcatctaagttttctataaacttgtttatattcgacatagattttgaaacaactaaatcttctaatcgttgagcattactcatattttctacatagtattcaattctgttaatatgctcagacataagttgtgtggttgataaaatcttctcatcactaagtttgcctgttggtatgtattttgttaaatagtttgagtaaccttttagaactgttaggggatttcttaaatcatgagaaaaagcagcattaagttgttttctatcattaatcatagtccacatatttatgttgtttttatttagttcagacctcattttttcaaaagcattacatagattacctaattcatcattattattatattctaagcaaaaatctaaattgttgttggatatttccattgcacctttattgaggatttctatgggtgtttttaattttaccttgtaaaaaattatatcagctaataataaaagtcctataaaaaatataagtggaagtacaagctgaagtatgttgattatattaagtaatgttttatcataatcactaaattggttcacattgttttgaactatggttataatacctgtatttataggtgtttttaaatacttatcttgtatagaattatatagattattaagtaaaatgtatgcgaaagtagtaagtactgatgctataattagtgaagataaagtaagaacaaagaaagctttttttaatgacatattacttattttatccatttataaccaactccccagactgtttctatataattttcaagagtatgttttgatagtttgattcgtatttttctaatgtgttccattataacatcactatttccattgctattgtatccccagactctatcatatattttttctttatcaaatacctgtccaggattcatagagagaagctctactatatcaaattccttttttgaaagtgaaatctgattattatatatacaaattaaccttttttcgtaatctattgttaaatcattataaaatttaattttagtttgatttgacttcctttgttcacgtcttaaatgtgcagatactctagctccaagttcgtctaaatcaaaaggttttacaatataatcatcagcaccagcacgaaaaccatttatcttgtcagtattttcaattctggctgtaagaaatagaatagggcatgatacataatctctaattctattacaaacttcaattccatctatttcaggcatgtttatatcaagtagaatgatatctggatttttggatattttttttaatgagtcttttccactttgagcagtgtaaacctcataaccattcatttcaaagtaatcttttaagagtgttattataccttcctcatcatctacgacgagtattttattgttcataagaatgctcccttctaaattaagtttgtatagtatttatattttagtataaaaatctcaataaattctcaaattcttagttatatttcaaaacttaatcattaaagttagtatatttttatatattaaataaatcaaggatgaaattattagaaattttaatagaatatatatttgatatttaatatttattggaatgcaaaaacacagctgatgaaatcttataatttaagttgaaaatggataaatagaaaggaaggattttaattaaaaaggtagattaattaaaaagtatataaattataaaaatgaattaatctacattaattagttgatatatcaattattattattttttcagttgcttaaaatatacttgatatatcaactaatgttgttttttaattaaaagaaattttaggaaagataatattaactaggagagataatatcaacattgaagaaggtagagcaatatttttacataattgtgaacattatctggcatgtgtgcattggtgttttaagcaagcaattcaatagaaagatgtgactaaaaatagaaagaaataccataatccacatgtaaagctagaagacataataagtaaaaaaagtaaagatatttaataaaagaaataactaatagtgattaaattagtaaatgctgacaattagcataatcattagtaattattagtattatttaattaaattaattttagcattatttttattaaattaattttaaatcaaattaatgagaaccccataaatttttttaacacttaatttatgatttatggggttatgttctgttttatttcaaagtattaagttcatataaatcagttcttctgtgcttaagaagtggtaactgttgtcttatgtcaggaattaaatctctatcaatgtcagcataaataatacattctttttcatcagcttgagcaattattcttccccaagggtctgaaattcttgaatttccaaaagctatataagaagcattcatatttctagcaggtgcagcaccaacatagaatatctgattatctaaagcacgcattcttatagataactcccaatgggcgggaccagtagtcatattaaatgcagcaggtaagataacgatttcaacacctttaagagccattaaacgtgataactcagggaaacgaatatcatagcaaatagctataccaacttttccatattcggtatctattacagtgacatcatttccagctgtaagagtatctgattctttaaaactaacttttcctgtaacttcaatgtcaaataagtgcattttacgatgttttccaattagagctccatttttatcaaatacatagcaagtattatagatttttccatattctaactcaggaatactaccagaaactagataaattccatgtttctcagctaatttactcaatatcgttgttgtttcacctggatattcttcagcaaatttaggaaaatatttattttcatatgggcagttaaacatttctggcaaaactataattttagctccattgatggcagcttctgttaccatatctacagcatgattgatattttcaattttattttctgtggtcatcatctgacatactgcaattttatagaaattcatagaaattactcctttcaatatttttatgttattataacatattaaataaaaattagatattcttagattgacctaaatgggtatggagagaagtgaataagaatattaaaaggtatataaaagttatttttattatagatggaacccatatattgactttttttatatatgttgatagtattattatagataaaatagaataattaatagagttttatagggttttgcaattattaatgattggcctggtccgagataaaacccacaacatagtttttgttgtgaacacggaaggacaaaaacctgggagatattttataatatttctcaggttattttattggaaaaataagagatacatttgaaaagagggatgagtttatgaaatggttatttttgtttgttgcaggtttgtttgaagtgttttgggcttttcaactaaaaaattcacatggattttctaaattaactccaagtatacttactgttgttggaatgattgtaagtttttattttttgtcattagcactaaaacatcttccacttggaacttcatatgcaatatggactggaattggtaccgtcggtacagctattgtaggcatggctatcttaaatgagcctattagtatatcaagaattgcatgtataggctttattgtggtgggaattgtagggttaaagctattatctactaattagagtatattaatttaaataagctatgaaattaaaggcgagaaaatgtttaaaaataatcaacatttaaaaagtctttacttcatagcttatcttatttataagtttattatatttgaaaattatatgtatatactatttatctaataaaagagcagttaaatccatagggtcaactattacaccatctttataaacacgcatatttccagatgctatttcatctattaagattacttcatcattgtagaatccaaattcaaatttgatatcataaagttcaagacctttttcagctatagtatcacgaactatattagaaattttttgagtcatgcttttcattgaatcaaattgagcttgagtcataatgtttaaagcttctaaaccttcagatgttataagagggtcacaacggtcatcatcttttaaagttgcttctacatagcaatctagtttagcaccttcttcaacacatgaaccataacgacgtaagaaactaccaacagctctataacgacaaataacttctaatccattaccaaaaacttttgctggtagaacttccatagttgcttcttctaaattagcacttacataatgagttttaattccagcattgtttagaatttcaaagaacttaacagatgtctctaaattagctctaccaattccatctatacttagacctacactattttcgcctgggtcaaatactccatctttaccagttacatcgtctttaaatttaagtaagtaatttccattatctaattcaaaaacatctttagtctttccttgatacacttttttcataaacaacctccaaaaagttaaattattatattgaataaggcattagtgtcaaaaaagttctgatattcgcatgaaaatttatattgataccttatatttaatattatatcacaaatagaagggaaatttccgaacaattttataaaaataacaaaaaaagtacattttataaaacttataataagagaactaatataaaatgttagtgtcgtttatattgacacacataagttttaatataagaaacttttgacacactttgacacacatttaatgataattttataaaatgcatgaatgcaatgcttacatatattggcatgaaagttgctttagatatttaacatataaacaatagggatatattctcaaataaaaagtaggggtggttaatagtgaagtcagttagattctatggtataagagacacaagagtggaggatgtggatgtaccaaaaatattagaaaaagatgatgtaataattaaagtaaaagtagctggaatatgtggttctgatatatcaaaatattcaaagacaggtccacatatggttggagaaattttagggcatgaattttctggagaagtggcacaggttggtaaagaagtaaggagttttaaaataggagatagagttgctgtttgtccagctatgccatgttttgaatgtgatgaatgtaaaaaaggattgtattcaagatgtaataatgtagcaataataggaaataaagaacttggaggttgttttgcagagtatacaaaggtgaaagagaggaatttaataaaaataccagatgagataagttatgagactgccgctgcgctagaaccagtatgtatagcagggcatggtctttttagatcagaagctaaagttggagatactgttgtagtacttggtacaggtacaataggattattttcaatacaatgggcaaagatatttggctctacaaaaataatagctgtagatgtatttgatgagaagttagacttggcgaaagagttaggggcagatatttgtataaatgcaaaagaaaagaatattgtagaagaaataaaaaggttaactgatggagatggtgcagatattgttattgaatcggctgggactccaatgacatgtgggcaagtattgttgttagctaaaaagggagggacagtattgtatgcaggtgtaccatatggggatgtagctttgactagagaacaatttgaaaagatagtaagaagtgaattaactgtcaagggaacttggtttggaaactcttttccattcccaggaaaagaatggagtgctggattgtatcatatgcaaaagggtgatatgaatgttgaaaaattagtaacacatagaataaatttagaagaagtaccagcttattttgaaaaagtatacaaaagggatattttctttggtaagataatgattaatatagataattagattagagtactaaataataatccatataaacaaggttaagaaaggtatgattcatatgacagggataattatagccacacatggaaatatggctaaagcaatgttagaaagtgctgaattaatagtaggcaaacaggaaaatgtagaaactttaggattaaaccatggtgacagcatagatgagtttagtagaaggttagaagatagaattgagaaatataaggatgaaggggttttagtattgcttgatttttatggcgggactccatttaatacatctgctattataataaataaatttgctaaggtatgtgagttagaatgtttgacaggtgtaaatttacctatgcttttagagctatttttaaacagagatactatgaagttaaaagacttgaagaatttatgtgaggaagttgggatatcaggaatcaaagatgttaaaactgttttaaagttgtaaaataaattaaaaatctggaggaataattatgagtaatatagcattaacaagaattgatgatagattaatacatgggcaagttattactgcttggtgtaagattacatcggcaaaaaggatagtaatcgtggatgatttagtagtaaaggacccatttatagttcaagttttacaaatggcagctccatcaactgttaaggttgaagtacatgatgtagaatcaggtgctgaagttttaaaatcacataatggagatgaacatttaatagtattggtcaaataccctaaaactgtcttaggtttagtaaatagtggggtagatttaaaggaattgaatgttggaggtatgggagcagggcttggtagaaaaagtttttataaaaatatatctgtgtcagatgaagaaaaagaaatatttagagaactaatatcaaaagatgttaaatgctttatacaaatagtaccagatgcaaagaaaattgatgtaggaacattattataaaaaagactatcttgtaaatctttaaaagaaaatagggaggaagaatatgcacatttcactaattcaagcagtattaatagcaattttttattatctttcttggagtccgtggttgacctatgttggattttttacatggaatagacctctattggctggatttgtaacgggaattatattaggagaccctgttcaaggagcaattataggagcaggtataaatatgatatatctaggttttatatcagcagggggagctcagatgggggacccagcttttgcaggatatgtaggtactgctttagctatagcatctaagctagatgtaagtactgcaatggcaatagctgtaccattgggaactgttgcaactgtactttggattggaaaaatgacagtaaattctttttttgcacattgggctgatagagaggttcaaaaagggaatgttgatagagtagcatttataaatatagtaccaccacagatactgttatttgcaatgagttttataccagcattattagttgtttattttggtccaaatgcgatagatggtatgttggaagtaatgaatgagaatgtgttacatgtatttaatgtaattggggctatgttgccagcacttgggattgctatgaatttaaaattgattggaaacaagtttactatgccctttttcatattaggaatactaatggctgtttattttaaagtagatataatagtaatatctgttattggagtaatacttgctcttacaattacttcaattaagtacggaaaagatagtgctacatcttaaatacatgtgagggggaaaatattatgtcagatataaaaaatgaagtatctaagaaaacgttaagcaaaaaagatgtaataaaatcatggttaagatggtttttctttgcgcaatctaattacaattatgaaagattgcaatcaacagctttctcacattcaatgttgccagtacttaaaaaattatatccagataaggaagagttaaaacaagaagtggagactcatttagcattttttaacacagaacctatatgtggatgtgttatacatggaataacaatagctatggaagaagaaaaagctaatggagcagatgaaataagtggagatggtatgaatgctatcaaaacaggcttgatgggtccactagcaggaattggtgatactttaactcaaggagttataactcctatagtgttagctgtttgtattggtttaactgagggaggagcatcaattgcaggtcctatattatttgtaatagctcaatatataataatgacttcaatttcttttggaatgtggacaaatggatataagtatgggaaaaaagctgttgaaagtatacttcaaggtggaatagtaaataaggttatagaaggggcttctatattaggtactttagtcatggggggacttgtaggtaggtttattaatttatctacaccaataagttatactagtggtgattttaaatttagtcttcaaacggatttacttgataagatatttccaggattaattcctttggtacttactttattagtactctttgctttaaaaaaaggcctttctccaataaaaataatgtttatactgatagtagtgggagctattacaggtattttgggactattttaaataaatatatatgttggtgtgtaaattaggattctatatctattgattatatttgtaagatgttggaaaatttatattaaaaagtttagcaattagggtaattttataatagattaaattttaaacttatataagctatatatagtatttaatattttaaaaagtatctcagaaagatttttaatcagaatgaggtgctttttcatttgcatataaaatattaagtaatttcaaaaaaatataaatttatttaatttaattaaaatattataatatattagttacatattaaaatatataatcgagatattgttaagacattgtcgagatattataatatataactaatgtattataaatagttgtaaacttcctgtaacatatattttatataattaaagtaatggatataatatgaaatataataatgaattttagggatgtgaataaatgaacatattaattgctgatgatgaaattagtatgcttaagatactttgtgcatattttaaaaaagaaaacttcaatgtgtttactgcaaaaaatggggaagaggctttagatattttttatgaaaataagatagacttagctatattagactggatgatgccaataattgatggaatagaggtttgtaaagagataaaggaaaatagtaatacaagggtacttatgttgactgccaaaagtcaaagtgaagatgaaatagaagcactcaacattggagcagatgaatatataaaaaaaccatttgatcctagagttttaataataagagctaagaaactaataaattataaaaatacaattaatattaaagatttaaaaatagattttgggtcaagtaaagtttttaaaggtgataaggaattattattgactaagaaagaattagaattaattcgttgtttaatcaataataaaggaatggttttatctagggaaaaacttttagatttagtatggggattggattatgagggagattttagaacagtagatactcatataagaagattaagggtaaaaataggagaagatataataaaaacttatagaggattagggtatagtctggaggattttaatgactaaactaaacaaaaaattgtccataagtatatctatagtagttgtagttgtttatataatatctataattataaatagtatgtttattcatagatattatttacatgaaaaaagaaatatattggataatgttgaaaatgaaattaaagataaagacatagataaattaaaatcagacattactttaattgaagaaaaaaataatatagatatcgtatatatagaattagataaaaatcataaagataaaggtaatatagataaaataaatcaagatttattaaatgcattttggaaaaaaggtttaagtttaaataagttttggattgaagaaaatagtttaaataatattgataagaaaagtataaataagatatacaatcaaggtaaaacaaaatatagtttgcttgtaaaatttatcaagaaggataattatttgtttgctatatctatacctatagaacattctgaagaaactattggcattgtaaatagatttaatataataatgggaattttttcagtagttataataactatacttacatttatattatcaaacagagttataaaacctatggaaaggttaaagtttttatctaaagatatatctgaattaaattttaggactgaagatataaaaacgaacgatgaaatagaagagctagcttacagcataaacataatgagcgaaaaacttgaaaaagcacataatgaattgaataaaagaaatgagaatctaaaaacttttatatcagatgcatctcatgaaatgaaaactccaatagcacttataaaagcatatgcaataggtatgaaagatggtttggatgatgggacttatacagatacaataattgaacaagcagaaaatatgaccaatacaataaattctcttttatattgggcaaaatatgagaagaaggagagaagtctgtgtctggtagatttaaaggaaaggttatataaaagtttaaaaaactatgagctgttgatagaaagaggtagtataagtgttaaatgcagtgtagatgataaagaacttataataagttcggatgaagatagtatagatatggtatttaataatttgattagtaatgctataaagtatactaataataatgaaatagagattaatctttttgaagagaatgagagaattatattatccataaaaaatggtatagattacaatatgggagatgatatagaaaatatgtggaagcctttttatgttttagagaagtcgagaagtaaggagctttctggtactggtcttggtcttaccatagttagaactatacttgaagaaaataattttagatacagggttgaaatttgcgatggaattatagaattttatattatctttataaaagtaatttgaattaaaatgtaaatataaagaataattaaaaaaatatcgcaattatttgtttttcatatggataaaattggttatttaatatataattacaagtataaataataaaatttatttgtaaaaagagtagcacttttaattctaaaggctactttttttatacaaaaccatgttttttataacaattcattaacataaaaatcaaacttaccttaaaatataaatttacaaatttttcaatcaataagaaaatttctctattccttacataatgactgtaatgtaacaaaataattacaaattaattatgaaatcattatagttagaaacctctttaaaattagatattaagtatcctttagaattagaacgggaacaaagttaaaaaattaagtaatatcaaatggacaagggggaagaaaataaaatgaaaataccaaagaagattgctgcaatgcttacagttacaatgatagctggaagttcaacagcaggcatagctagtgcacaaactgtggcaacaaatttaacagggcaagaaagatatgaaactgctgttaaaataagtcaagatggatggaaaaatgctgatgaggtagtaatcgtaaacgactcatctatagcagatgctctatctgcaacaccatttgcaaaagcaaaaaatgctccaatacttttaacaagtaaagataaattaaatgataagacgaaagcagaaatacaaagattaaaagctaaaaaagtatacttaataggtggaacttctgtattaagtacaaatatagaaaaagaaataaaagatttaaaaatatcttttgagagaatctctggagctgagagatatcaaacatccttagaattagcaaagaaattagatgctataagtgatgttaagaaaatagctgtagttaatggtgaaaaaggacttgcagatgctgtaagtgtaggagcaccagctgcacaaaacaatatgccagtaatacttgctgattctaaaaatggaacagcagttgcagacaaatttataaaagatgctggaataactcaatcttatgtagtaggtggagagagttcaatttctgaagctgttaaaaataaactaccaaatagtacaagactaggtggaacagatagaaatgatacaaatgcaaaagtaataaaagaattttataaaaagacagatttaaaaaatgcttatgtaactaaagatggtatgaataaacaagaccaacttatagatgcactagcagtaggtgtattaggtgctaaaaatcaatcaccagtagttttagttggaaagaacttatcagcttcacaaaaatctctagttaactctaagagttttgataagataactaaagttggtgggaatggtaatgagacagcatttaatgaaatgaagtcattacaagaagtaaaaacagttgaagctaaaacaatttctgaattaaaatcagctatagataaagctactgctaatgatgttataaactttaagccaactagtgaggttaaagaagcatttacaatacaaactgataaggcgataacagtaaacttaaatggtacatatacaaagactgtgactatcaacatgcctaatggtgatgtaaataactatgcaaaagtggatgatgtagttatagatgatgtaaaagatggaacttttgttaactacggaaaaataactaacttaaaggttaatgataaaaatggagccaagatagaaaataattctaaaggtgagattggtagtttaacagtagcatctggagcaagtcaagtaaaagtgactaatggtggtaagataactacagttacaaataattctaaaggaactactatagataataaaggtacaataagtagtgttaagggagataattctccaacaataagtggaaatagtccaagttctaactcttcaggaggaagttcatcaagtggaggttcttcacatggaggaggaagttcttcatcaaaagtagataaagtagttttgaaaaatacaataacagcagcaaataaattgtataatgaagcaatagagggaacaaatgtaggtgaatataaagtagggtcaaaagcaatatataaaacagcaatagacaaagcacaggcaatattagacaaatctggtgtaacacaaaaagaagtaaatgatgcagtaacagcattaaacacagcaacagacacatttaaagcaggaaaagtagtagcagtagataaaacagcattacaagatgcagtaacagcagcaacagcattacatgctaaagcaacagaaggaacagcagaaggaaactatgctgtaggatcaaaagcaacgtataaaacagcaatagatgaagcacaggcaatattagacaaatctgatgcaacacagaaagaagtaaatgatgcattatcagcattaaacacagcaacagagacatttgaagcaggaaaagtagtagcagtagataaaacagcattacaagatgcagtaacagcagcaacagcattacataatggagcaacagaaggaacagcagaaggaaactatgctgtaggatcaaaagcaacgtataaaacagcaatagatgaagcacaggcaatattagacaaatctgatgcaacacagaaagaagtaaatgatgcattatcagcattaaacacagcaacagagacatttgaagcaggaaaagtagtagcagtagataaaacagcattacaagatgcagtaacagcagcaacagcattacataatggagcaacagaaggaacagcagaaggaaactatgctgtaggatcaaaagcaacgtataaaacagcaatagatgaagcacaggcaatattagacaaatctgatgcaacacagaaagaagtaaatgatgcattatcagcattaaacacagcaacagagacatttgaagcaggaaaagtagtagcagtagataaaacagcattacaagatgcagtaacagcagcaacagcattacataatggagcaacagaaggaacagcagaaggaaactatgctgtaggatcaaaagcaacatataaaacagcaatagatgaagcacaggcaatattagacaaaacaggtgcaacacaaaaagaaatagatgatgcattatcagcattaaacacagcaacagacacatttaaagcaggaaaagtagtattaaataaaacagcattacaagatgcagtaacagcagcaacatcattacatgctggagcaacagaaggaacagcagaaggaaactatgctgtaggatcaaaagcaacatataaaacagcaatagatgaagcacaggcaatattagacaaaacaggtgcaacacaaaaagaaatagatgatgcattatcagcattaaacacagcaacagacacatttaaagcaggaaaagtagtattaaataaaacagcattacaagatgcagtaacagcagcaacatcattacatgctggagcaacagaaggaacagcagaaggaaactatgctgtaggatcaaaagcaacatataaaacagcaatagatgaagcacaggcaatattagacaaaacaggtgcaacacaaaaagaaatagatgatgcattatcagcattaaacacagcaacagacacatttaaagcaggaaaagtagtattaaataaaacagcattacaagatgcagtaacagcagcaacatcattacatgctggagcaacagaaggaacagcagaaggaaactatgctgtaggatcaaaagcgacatataaaacagcaatagatgaagcacaagcaatattagataaagcagatgcaacacaaaaagaaatagatgatgcagtaacagcattaaacacagcaacagctacatttgaagcagggaaagtacctactacaattgcattaatgttatcaagaatactaggatttatgaaataagaaataaaaagcaaattatttaataaaatttatatatactttaaatagaaaatttaatttaaggctgtgagtaaaatttttaaaaataaatttatacacagcctttttatcatgtaaagttaattgatatagtaattttagataatttagagatataaaatttaaaatgttagataaagttcaaagtataacctaatatcaaaacttcacataattttcatattaattatcaattaaattcacacacaagagttattatataaacatagaagatagtaaaactagcttaaaaacataatataataccctatacaaaatagtggcaactctccctcacatcctcaattgttgccactattttaattttttgtaaaaaacaaaaaaactccacaaagtggagtatttataaatttaatatactcttttaatagtatgctttactatactttaaaacaaacagaatttttaatctcaagttttttatttatcttagcaaccttaatcttaatcttatccttcaaaggaatacatcctatattactttcactttttacatcaacacttccaacaaatttaccagagtcattataatactttgcaacaccaacaatatctcccttatggataggataattcatatttttaaacactaccttaggattgatattttcgttatctgaaacaacaccatacaaatctttatcaaccttaactgttatcttaaaatcatcaataccatcaacacaaggagtctctataatatcacccttatgtgctatctttttagaatggaaattatctttaccatatttcaataaagtagcggaagaagaaattctatttttcttgttaccatcaccaagtacaacacctatcaatctatgatttctttcgtttttagcatctttaggtaccatcatagaaaatgcaaggcaatatccagcattatctgtatagcctgtctttattccatcaacaccaggtactgaaacaagtaggggatttgtgttataatgtgtaaaatcctttttagtatcattatatacttgcatagtggttattcttgtaacttgattttcataatggtcatacatatactttccaagtgtaactatatcgtgagcagttgacatattttcaataggaggttctttatgttctgggtcagtatatataggaagcccatttggattaaaataatacgtatcaatcattcctatttcttctgctttcttgttcatcatatttacaaaattcttttcagtcttaccaatatgtttagctatggctatagcagcatcatttccagatactagcattagaccctgcataagctctcctagagatatttcatcaccatctttaagtttacaagtagaacctcctactgaagctgtagacttgtctattttcaccatatcagtctcttttacttgattcttatcaactgcttctattgccaataaaaaggtcatcattttacttaaactcgctaatggcattttttcatcaatgtttttttcaaataatattcttttagtttcctggtctataagtagtgctgctcttgaagaatttggtactggtggagtatctgcaaatgcaaatacaggagttataaatataaaaattaatgcaagtattgttaactgttttatttttcctttcaaaatctcgtcctccatttcatatattaattaatatgcacaaaataagtgctataaattttatttatttagatactcattaatcatgtctattatataagcaatttcttcgtctggtatcaaaatattaaaataagcttctgttggcttaaaggcttcacgtattaaactatatagttcatgatttttactaattaattcagtaatgttattatatggaaaagttgtatttttaaaacatctttctatcataaaagagcaatgtagtatatatcctagcttaaatttgctctttaagttttcatctattaattctattattgtaaataaggaagaattgacatagttgaataatttaacagagtccaaaagttctaagttttgggtcataaagtttattattaaactgttgtatgatagatttgtttcttttatatttgtaatactattggcattgaatgtaccttctattattttgtttagcatatctaggccatatccatttagtaattcctctatgtgtataaaaggggtgttggctacattaaaatctacacttccaacaactgccagaattttagtattactaaatttattcttatacattttaaaactttctatattatgaggaactaaattaatattgtatttacgaatatttttaagtgaagaatttataaagtctgctactttcatagctgaaccatatcctgttatacaagtagttattattacatactctcttgacttttcaggatagtttatttctgttgaatcgattgctgctcgtccaatatatggatttaaagagcttaaggaattagctaattcatccaaagtcatttctggtaatgtactttttcttactgcttctaaaactattggagtagataccatttcaattgagcgagttttgatttttgttttttctgaaataagttctccaaaagctataagagagcccatatctgttaaaagaagtacacccttaccttcgtcacattcttttaccaactctatagttttatcaagtatggtacttacttttacatcaagaggcatgtcaattgcattacaatggtttgtaccaagcaatgaatttgctacatcacacatactgcttgctgttgaatttccatgagcaagtattatgactcctatactttcagattgattgtttggttcaagatacatgctatttagaaacatggatataaattttacttcatctttaggtaaagatgtttgtaagtcattttcaattatacttaaaactattttagatatatttaaatctttatctaagaaaattttatcattatataaattgtacttaggattataggtgtcttgatttatattttctataagtgcacttatatgcattgaaagagcaatataagtttgttttgtgtatttgtttctcgatattttttcggcctcttttaaagaatgttcaacagcatagtaaatctttggattgattactttaaaaatttcattacttgtataatcagaatgagttactgaagatatcgaaagtaattttgtagagtacttttccatgtaatttataaacatactccttatatcattttccagataaggaatctctgtagagtatttaaatccattgtttgatgtatctatattgtatttagatagttcttttgtatattcaacttctaagttattaccattaaattcataaaaaagcatataatcaagttctgataatttatttagattactacgattttcattcaattttaaaagaccaatatagatgtaatcaggaacaagggataaatctatttctatattatccttaagtccagttttgtaatttaaaaaggctcttgcactcataagttgtatgtcagatttaagctgacctatattaccaaaacaatcataaaggagtaatgatttaattacatctttgtgaacttttatagttgcattggtgtattttgattctataataaagaagtatttaataagagataatctttcttttaaagacctatcctgtaaagcaggtaggttgattgtaacagggattcttcttaaaaaagtcccaagcagagaagaatgtatatcttctgttgtggcacacacaataaagacattagctttgtgcacaatgtcagattctcctaatcgtctgtatatgcctttgtccatcaaaagaaaaagcatctcttgaccttctggtggtaatctgtgtatttcatctaagaataatatgcctccatcagcctgtgcaactatgccgaatttatccttattagcaccagtaaaagaacctttgacataaccaaataaattacttaataataagttagcattttctgcatattcagcacagttaaatactacgaatttgctttcagaagaaaagattttactttctacagcatatttgtacattgtttcggcaaatgtactttttccaacaccagtaggtcctatgagtaacgtattaagaccttttggaggatagagtatagcagatttagctttttctataggtagtttaagactagaatcatgtccaagtaatgttgaaaaaatatcttctgagtcatttttacttgatttaagtagctcattacaattatttatagaaaattcatcactgttcaaagtacggccaattaaattttctataatactaacatgtagaaataaaattggcttaccagatattttcagaacttttttttcattatataggttatttaattctttactggtattacttctatcaagagatgaatggttagcaatttctattgtagtgaatcctgttttatctgattgaaggtcttttaaagtcatattttcacataatttatgtagagataatagaactttatcttttcttagcatataccatttcctttctttatgtttaaactatatttaagctacattaaatatattataatatatattcagtattaaaataaggtttatagtggatattttgtattttactttttaatatgttgttttgtgtaatagatggtgttaaaataagagttgcattatattaggtatggatttttatagattaaattagagtattatgttgttaaataactaaatttaagttttttaatatacttcagtctatgtaatatcatttattagtatatggtcaatgtaattaatatatggtcgatatagatgaagatatatgaaaaaactgataaggttaagaataatttatatatacacagttaatacatatatacgtttacaaattatattttgtatcataaaaataatgttttatattgtacatatataaatatgaagttgctataagcttaaatactcaagagaaagaattaaaagagatataattttatttgtagtaaaaagttatacaatttagaaggttatataaatggttgaaagtgtttgtcaaatattaattcagccattttatggtgtaaacaagcttaaaatttgattttgacaagcataaaaaacaagttttttcataaaatgtaaatattggatatgaattatttaaaatagtttaaataaataatatcttgtattaaaatatgaataatactataaaagaatgggagatatgttttgtggatatagatagaattttaaacttttcctcaaatgcaggtaaagctatgttgcaaagtggaggagaaacctatagagttgaagaaacgatagctagaatatgtcaatcttttggaatagaccacgtagatgtatttgcaactccaacagctgtaatggcatctgtatttgtagatgggaaattacattcagcaattaaaagaataagctcaagaagagtagacctaaacttggttcatgaagttaactcattatcaagagcaataagtataaataatttagatattgaattatgtgagaaaattttagatgaaataagtgaagataactattactcggatttaataacaatattttttgcaggtattgcagcagcaactttttcgatattatttggaggaaatgtggaagaatttatagctgcatttactgttgggattctgactaagtttgttattatgtatttaagtaaatcttcacttaatgacttttttgtaaatgcaattggagcagttattatagcttcttgttcaattttaattttaaagctcggatttataaagacgttagaccatttaatagcaggagcaataatgctcttagttcccgggcttgctttgactaatgcattaagagatttgttagatggacagttgatttctggtcttgcaaaattagcagaagtattttttgtaggtgtatctatagcagtaggaatgttcttggtacttggattatacttcaagttaggggggatataagtgcatttgtttatagaagtaatagcagctttttttactgccttaagctttggagtgctatttaatatgaaaggaaaaaacttaatactagcaggaataggtggaagtatagcttggttttcatataaatttcttttaaatatgggagtaacagaaaacttatgtttttttatagctacagtttgttttgcgatatattgtgagttatgtgcaagaatttatatgactccagcaactacattaagtgtttgttgtttaataatattagtacctggttatggaatatataatactatgtattctgttttgaccaataattatataaaagctgtagaatatggggtgagtacattatcatgtgcaagttcaattgcattaggattggtatttataactactgtatttagaaaagtcaacttatatggagtgcttacaaagataaaagaaaatgaaaaatataaaaagagtataaataaaattaaacaacaaaaatagaaaaaattgacttttaaacaaaaggatgataatataataacataaaatagaataagagtatccaaattaaagaggatattcttattctataaacgtaatttttttttatttcaaaaaactgacaacttgcattacgagtgtaagttttagaactcagtttgtaccaaaaaatttgtaccaatgttaggaaccttaatttaaaattaaaagggggaagatttcaagatggaaaagctgtcggataagagaagagtcaaggcagtaagtatggaaaccttcgtatttattgtactattggcggtaggatttggatatgtaggaagcatcatgggtgcaggaatgatgtttaaagtaataatgagtacagcacatgcgcttttattagacacagtatttttaataatggctatggcagttcttgcaggtgcacttagtgcgttgctttcagagtttggagtaatatctttagttaataagatatttaagggtcttatgagacctatatggggcttacctggtgctagtatagcaggagtagttgcaacatatttatctgataatccagctattataccatttgctaaagacaaaacatttacacaatattttaagaagtatcaagtacctgctttatgtaatttaggaacagcctttggtatgggacttattgtaacaacttttatgatagctcaaggtaaagaatatgtactaccagctataataggtaatgttggggcaataataggtagtattattagtgttagaattatgttgacttttactaaaaagtattataattatgaccctaaaaatgatactgaaaagcaaataaatgataaaggtgcaaaacttgaagagtttagagaaataagagatggtaatgtattccaaagaacattggatgctatacttgaaggtggtaagctaggtgttgaaatgggtatggctataataccaggagttttagtagtttgtacattagttatgttattaacttttggaccatctacagaccctgctacaggtcaagctgtttacacaggagctgcatatgaaggtataaaattattacctgctattggtgataagattagcttcataatagaaccattatttggattcacatcaccagaggcaatagcattccctgtaactgcattaggagctgttggagcagcaatatctttagtaccagagtttataaaatcaggcgctataactcctaatgatatagcagtattcacagcaatgggtatgtgttggagtggatatttaagtacacacataggtatgatggatgctttagatgcaagaccattggctggtaaagcgatactttcgcataccataggtggtttgtgtgcaggtatatgtgcccactttatatttatgcttgttggatagaaatgttccataattgaagtattataatttataaaattgaataaaactattgatttaagtatgtaaaaactaaattagtaatttaaatatataggtgctgttttgaaatagagatttattttcattttaagacagcaccttttagtaatttaagtacattaattaaatgtattgattgaatttattatgataaaattgtattatataaaatagagccaatttaaacagtaacaataaggaggaattgtagtaaatgaaaaaggaacgactacaacatgaagacttaaaagagtatgattatgatgaagatggctatctcagtaaaaagataattattaaggacttcataaaaactatattggttatgacaattgctactggaatatcagtagtttttgaaaaggtaggttttaatgaatctaatattatactagtatacatattaggtgtactatttgctacaagtataacctatggatatttttttggaatactttcttcagtaataggagtgctatcatttaattttttctttacgcatccattatatacttttttagcttatagaaaagattatcctatgactttttgtattatgctaatggcagcaattataacaagtactttaacttctaggataaaaagagaagtgagactttctcataagagagaaaaaatgataagattgctctatgagaataacaaaacgttgcttaaagcaaaaaataaaaatcaaattattgaattttgtgggtctaatttagtaaatatattaaatagaactgtaatagtgactattgcagatgagaataataatctaggtaagccaagtatttatatttgtaacaatgatggaagtgagaatatattccattcagtattagaaaaagaagctataaaagaagcttttaggacaggtaacccagttggaattgggacaaaatattgcaaaaacagcagtgcatattatttccctataaaaggtcaagaatcaaatgttcttggtgttataggtgttgcgtgttttaagatagatattattacagaaaatgaaaagatactattagaagcagtttcaacacaggttgcgttggcaattgatagagaaaatttatttgagaaaaataaaaaagcaaatcttgaggcagagagagagagattaagaggaaatttgcttaggtcaatttctcatgatttaagaactccacttacaagtatattgggttcgtcttcaacaatacttgaaaatgatgatgtgatagataaagaaactagagtagaattattgaaaaatatatatgaagatacgagttggctaactcattctgttgagaatatacttagtatgactagaatagatgaagggaaattggatattgaaaaacgaccagaagttgttgatgaaataatagctgaatctatattaagagtcaaaaagtttgccaatagtagagacataaaaaccaatattccagatgagataataatcgttcatgtggatgtattattaatagaacaagtgttagtaaatttaattgataatgctataaggcatacacctaaaaattctaagatagaactaactgtaaaaaaagagtcaaatcaagtgctatttgaagttgcagataatggaaaaggaataccaaatgaagatatcggtaatatttttaataggttttatactaagaataagtctagaaatcttgaaagaagaggtattggtcttggattggagatatgtaaatctatagtagaagctcatggtggagaaattgtcgcatttaataatccttctggaggagctacatttagatttagcatacctatgtatgatgaggaggggaaagacaagtggaaataaagccattagttctaattgtagaagatgataagccaatttgtaaatttataaaagtatctcttgaaactcaaaattataggtgtgtagagacagataatggaggaacagctatatcacttatacattctcttgacccagatttgataattttggatttaggactaccagatattgatgggattgaggtaataggacgagttagggcatgtgcaaagactaataaaataattgttgtttcagcgagagagcatgagagggataaggtggaagctttagatggaggagcagacgattatttaactaaaccttttagtgtaacagagcttttggctagagtacgtgtggctcttagaaataaagctcaacaggataatataaataatgatgctccaaagtcttttgaagttaaaaacctaaagatagattatgaaaatcatattgtgtcaattaatggtgaagaaatacatttaactccaatcgaatataagattattgagttgatgtctaagtattcaggaagagtcttaactcataagtttataatagataaagtttggggaaattactatgaaagtgaaaatcagtcgcttagagtttttatggcaagtataagaaggaaaattgaaaagaatcctgctcagccagaatatattttgactgaggttggggtaggttaccgtatggcggatgaatagatactaaatgattagttgctgagtgattactaaatgaatatgagtaataatcagatagaaattatttgttatgtaagaaaatctaagtattttaaatcgaatacaaatagctatgtatattttacaatgaaatggatagagagttaatctatctaatcttgaatttacatagctattttatttttttaagagaatacaaagtggatgatgtatttctgtaatagaaaaagtatccaattttagactaattacttatgtaatattaacttgtaaagttaggatttgcctatttcattttttcttagttttgacttgtcttacagctatcattgtagttgcaaaaaaactcaatgttgcaccagcaaatgctgggtaatgtcccataaatccagcaatacaaaaacatattcccactacaaacaacaagaaactaaatattttcataactattctcccactaaaatttaatttattaagcatattttagcagatattaatagtaaaatcatcagttttgatgacaggaaaagtatatcatattttatgctttattatgtcttcttcgttgattacttattagaccacactttttaaagtgtgctaagtgttgttttgcaacaaactcttaataactatatgctaataagtgtaagggaagtaagtagaattgttaaatatagcatctatatggataatatcaatttatatatggataatatcaatttaacattttttttgatataaaaaaattaccctttttgtctttttatatcagcctttgtgatattatataatatatcaaagtaacaatctagataatttattattgaagaaattttaatatataatagttttatatttttaaatgaatgaagtattatcttcatatatgattggaatacttaattgaggtggagatttgtcatttatatgagaattaattgtaaacacataataagatagttaattataaatatattaaattaggtattacaaaactctattgtacgattgacacaataataattctatttactaaaaaatagaactttattaaggtactattttaaaacataaagaagtataatatcattgccaaatatatagcaaaattttaaaagctttaaaaattcaatctggaaaatgaataaaaggagatatatataaatggatgtaataaatttaatagatgagttggatgaaattgtatatgtttcttctttagatacatatgaacttttatatattaatgaaattgggaaaaaggcaatgggaattaatgatatatcccatgtaaaatgttataaagcattacaggggaaagattctccctgcgaattttgtacaaactctattttaaaagaagatgaatattacatatgggaaaatacgaatactcgaacaaatagacattttatattaaaggacaagttaattaaatgggagggcaaacatgcacgattagaaatagctcttgatattacagaaaaggaagatataagtaagtcaatagcagaaaaattagagataaaggagttattagttggatgtattaaacatcttataacagaatctaatttttctgatgctgtaaatcttgtattaaccaatattggtaaatttcataaagctgatagagcatatgtttttgaagtatcagaagatagaaaaaaagtaactaatacatatgaatggtgcaatgaaggtgttgatgaacaaaaacaggcactaacaaatcttgatattaatgaattaaagaattggtttttattattcgaacaaaagggttttgtaataattgatgatatagaaaatataaaagaagaacagccaatagaatatgaaattttaaaacctcaaaaaattgaaagtttaatgacatcttcactaaaacaagatgataaagtagtagggtttattggagttgataatccacataaggctgttggagatacctctcttttgacatccctatcttattttttattaactgagatgaaaaaaagaaaagtagaaaataaattaaattatatgagctactatgacttcttgactggtgcatataatagaaacaaatatattaagtatatagataattttcaaaaaggaaaatttaaatccataggagttgtatttgtagatataaatgggttaaaagatattaatgataactttggacatgctaatggcgactctgctattgtgtcagcatgtgtaataataaaaaaatactttcattcttataatgtttaccgtattggaggagatgagtttattgtattatgtgaagatatatcaaaacaactatttgaagaattagtgagttggttaagtgaagaatttaaggatgagatgatatatagtgtagcagtgggcagtatttggagtgacgataatattgatatacataagctaattaaagttgctgatgagagaatgtaccaagataagaagaggtattataataagaacaaacttagaaataatgaaatggaagtaattagtgacttagctgattcgacgaataatattttatttaaacataaagagttagttgataaggtttattttgatgatttaatgataaaagggtattctaaggcttatgaaaaattagcttataatacatatgatataattttatctatttgcatcgatactaatttaattactccaatttatcaatcagagagcaatatttttagttttcctataaaggaaaatcttgaaaaaactttttcatacataaaaaaacatttaattcatcctgatgatataatattatttgatgataaccaccttctaaaatctcttgatagtcttaataacagcaagcaagacgatttagaactaaattttgagtatagacgtttaggaatagataaaaagtactattgggcattaatttatatgttaaagattagtagtaaaaataagttaggtgagaaacaaacacatattttagttgctataaaaaatatagattatcttatgcaactacataaaaaccaaaaggatatattaacaggactatacaattatgaaagtttttgtgaacaaacaagtttaatgcttaaaagatatcctgacaagagctatgcaattataatgatggatatagataagttcaaggtaattaatgacatttatggagttagaggaggagataaggctttaatatatgttgcagaattgattcaaaaaaacattggttctaatggtatatgttgtcgtatgtatgcagatgtattttgtattttttatgagagttactctgatagagatgttcataaattaatttataagattaaaaatagcttaaatagaaaaaaatttgaatatatgttagtaccatgttttggggtttataaaattttggataataatattccaattacaaatgcgtgtgaaatggcaggatatgctcacaaaaaagtaaagaaacaaagtatcaataactatatattttatgatgatactataagaaatgatgcacttgaagaaaaacagatggaaagggaaatggaatacgcacttgaaaatgggcaattccatgtatatctacaacctaagtataatcttaatgcaaataaaattgttggtgcggaagcattggttagatgggttcatccagaaaaaggtataatacctccaattaaatttatttcactatttgagaagaatgggtttattatcagattagacatgtatgtgtgggaacaagtatgttctttgattagaaaatggatagatttaggtgaagagccagttcctatctctgtaaatgtatcaagattacatttgcataatccacattttaaagaaattgttttaagtttaataaataaatatagtataccaaaatcttttttagaattggagcttacagaaagtttatttattaaaaatataaaattatttactaagataatagccgaccttagaatggatggtattgttttaaatatggatgactttggttcagcatattcttcattaaatatgttaaaaaatattaatattgatacattgaagatagattgtggcttctttaatgaggaaggaatcacagacagagaaaaaatagttttaaggcacactatagccatggcaaaagatttagatatggatgtagtggcagaaggtgtagagacaaaagaacaagctgaatttttagtgagtttagattgtgtggtaattcaaggttattattattgtaagcctattccaagtgctgattttgagaagttactttatcaaaaataagctaattatcccactctaaatgtaggtaggatggagtagttcaacataattaaatagaagtagaaaatagtgaggatataatttttaaaaagtataatatttatggattaggagcgaagtttatgatagtgggtattataggtccttcagactctgggtttaagataaaggatgatttaaaacagatagacagtgatttaaagactaaaatatatgtaagagaaaaagtagtagatacaatagaagttatttctaaatgtgaagatgaatgtgatgctattatatttacaggatgtgcagtttatgaatttataaaatctaagtatgagataagtaagccacattcatttgtaccgagaagtgggacgagtataatgaaggcattttgggcaataaaaagtgcaaatataaaattagataaattcagtatagatgtagttgatagatatgttgtggaagatgcacttaaagaatttgatattaaagcaacgagtgtattttgtaatccattttctttggaagtaggagagtctgaacttgtagaatggcatataaaattatttgaagaaaataagacggatataatgttaactggttttggtgcagtatataatgaattaaaagaaagaggctatcctgtatttcgtttacaagctactatacaattaatcaaagaaagttatgataaggtaaagagtgaatatgctctaagcaaggcaagattttctcaaattgctgtcgaaatattgagtctaatagattataaagagaagatagataactattattctgacatgataaaaaaatcagatatggataagcttgtagtaaactatgtaagaagcattcaaggttccttatttttacttggaagaaatgattatgttgtatttgttcataaaggggtagctgataatgagtataattatgataagctattcaatctaaagagagagataaaagacatgggcttttctcttagtataggaattggtactggagtaactgcgtatcaggctgaaaataatgcacataaagcattaagacactccatagattcaaaagaaattggtatatatttggtagatgaagatgaaaatataagaggacctttagcttccgaaaatgaattaaattattctttgatgctatctgatgaaaaggtaatagaaatatctaaaaagactggaatgagttgtgagtcagttgcaaaaattattgctataagtgagaatagaaaaagtaagatttatgattcaaaagagttagcagagtatctaaatgtaagtgaaagaagtgcaagacgtatattaaataaaatagtaaatgcaggtttaggtcgaatatgtgcaaaagagactagtattggtggaggaagaccaaaaaatattactgaaatactgttttaagatattttataaaactgtataaatcattatattttataaaattctacaacaaattactatataaagtattaaagcttatcatgaaaaaaattagaacaaattattatataaaatactagagcttgttattaaaaatactagaataaattattaatataaaatactagagcttgttattaaaaatgctagaacaaattattataaaaatactaaagcttgttattaaaaatgctagaacaaattattatataaaatactagagcttgttattaaaaatactagaacaaattattatgtaaaatactaaagcttgttattaaaaatactagaacaaattattataaaaatactagaacttgttattaaaaatgctagaacaaattattatgaaaaatattgaagcttattatgaaaaatgttagaacaaattactatataaaataccaaagcttattatgaaaaatgttaaaataaattattatataagatactaaaacctatgtaaaacaactttaatatataacttataaagttgaagatacataggtttttatttttataatttaaagaggtatattatgatatttataatttaatcatatgataaactattttggcagtatcatataattcgtctatatttacatattcattaactgtgtgtacatcatacatacctagacttaatatagcacaattatatccaagattagctaatatatttgcgtcacttccaccaccaattaccattggatttggaacaacaccaacttgtcttattgcttcttcacttaacttgaaaacgtgactatctctactaagttcaaaactagggtaagacatactatgttcaaaggtataagtagtattaaatttagatgcagcatccttacaacatttttccatatgattaagctcatactctaaagtttcaggtatatgagacctaatttcagcagtcaatgtaaccttatcagttactatgtttgtagctccaccaccttctattttacctatatttgaagtagtcaatggatctattctgcctatgtgcatattgcttattgcatgagaggctactaatatagcatttaaccctttttcaggttctataccagcatgtgctttctttccatgaaaagagatttttatagattgttgagcaggagctttgtatgctatcgaaccaatagctccaccagaatctaaaatcaccatatctttacaaggcaagttgtcaggattaaagtttttgacaccatgcataccagcttcctcacagattgtaaaacaaagataaatatctctatgtggtattttttctgtagtaacatgttctaaagcttcaagtatagcagctattccagctttatcatctgcaccaagtgtagtagttccatcacttctaactacattaccatctagtattggttttacacctaaacaaggttgaacttggtccatgtgtgcacataaacaaagtggtctacttccttcttcaccttttatataggcaatgacattacctgtattaccaccatatttttcacctgcatcatctataatggcatctatatttctttcttttaagtagtttaccaaccacttagacatttctaattcttgattagatgggctatcaattctaaccatatccataaaattatttataagtctatttttatctaacataaattatttctccttttagaaagatttaaataaattacatgctatatgaaggaagtattccaggtcctagtggaatattaaataccataaacaatattaatagtatagtccacactattaagaatgatatagagtatggtatcatattagcaattacagtacccataccagcatctttatcgtattttcttgtgaatgctagtataatagggaagtacggaaataatgggctaagtggatttgttatacaatcacctatacgataagccatctgagtaagtgctggattgtatccaaccatcataaacattggtacaaatataggtgcaagaatagcccactttgcagatgcactacctataaataaatttataaaacatgataatataataaatcctatcaacaataaaggtccatttattcctgctgattttaaaaattctccgccctttacagctagtatcagacctaaattactatttgtgaataattgcaaaaattgtgaagcagcaaatgctagtattatatatccacccatatcactcattgcactagccattatagagactacatccttatccttctttattttacctatagtttttccgtatacaacaccaggtatgaaaaatgctagtgctattataggtaccatacctttcataagaggagcattgtttgatagtaaatctcctgtttctgggtcagctaagaatggttttttaccgattacactaagagctactataatagctacatatattaatatacttataccagcttttttaagccctttcttttctacatcactaagacttccatcaacatctagttctgcatttccttcatatttaccaaatctaggagctacaattttttctgttacccatgttgccaaaagtattagaacaaaagttgatgctatcataaaaaataagttcattgttgcattggcttgaaatccagaatcaatcatttgagctgctggaactgtaaaacttgcagcaagtatatcattgacacttatcataatgtttgcggcaaatcctagacagactgctgcatatccagaaaataaacctataagtggatgtctaccaacaccaagatatacaagtgcagctaatggtggaaataatattgtacctgcatctgaagctatattggcaagcatacctatagtcattacaacaagagttactcttgtttcaggaatcttgcttactgatgctttgattgttgctgtcataagtcctgttttgtcacatacaccagcacctatcatagttactagaactagacccaaaggagcaaacccttggaaattgctaactatgtttcctaaaagaatttgaagctgttctacagtcaataaatttactgcagttatagtttctccagtaccaggatgaactactgatatccccatagaaccaactagactagatagtataagtaaaagtacacataaccctaaaaatattgtaactgggtctggtagtttattaccaacagtttctattctgtttaatgtcctgtcaaaaaagtttttcttcttaactacgttatcattcataatatcctccctaatgtttaaaaatataattaaaaaataagtattgtggttgatcttacaatataaattctgcttgtcgatttaagacgtgtccacaatatgtcctaaaaaaagtataaaataaactttttcctgtgtcaatgcagttttctgaattttctggttgagtggtgttagttaaatatgctttaagtagattaatgacgaattatatctaatgtatttaaatagcatatgcactttaaagttaattttaaaacaaaattttatgaaaagctagtggaagattaagttattaaaataagtagcgtagtaaagtgttagattttttaattaatcaaagaaatttactttgtattttctacaaaaatctgtgaatatcttttgaattatgtagaggatataaatttattttatttacatagattagattttgttctaatttactgtattcaaatggttttccatgtccaggataaatcattttaggttttgtattgatgattgttttccaagattgaataaattctagtttgctttctgcaaatatggtaattttgtgagtacttggaaatccattcattgcagaatctccacaaaataaaacaccatcatcaattagtagtgaaattgaatcagcagtatgtcctggtgtatctataatttttccatttagttctttttcaatttctttacgattcttgtcagacacaagaatacaccttttttcaaattcttgtttaagtggagaaaaactatgctcaccttttccaaatagtttcataatttggcaaaagagaaaggcagtacggctgttacaaccaccaataaaagagttttgacctttatatagaatttctaaagctttatcatgcataacaatctttgtattaggagattcgtctagaatctgatttagaaaaccaacatggtcatcatgagcatgagttagaaatatgtatcgaatatctttgatttttatgttgaatttagaaattcgttttttgaaatgtttaaaaccattttcatatccagtatcaatcaagacaaagccatcttgaatagggtacaaccatgtatttataattcgatttcctgcattaaacattttttcaccaccttgaattagaatataaatttatattaattagaaagaatatagcatagttctactgatattttaacgtatctctaaaagttttaaggaggataatatattttagtttaatctaaaagctaaaagaaaagaagtatactgttacaaaaacaaagagtggtataacttttacagtagataccaccctattataaaaatagacttataaagttttatcgtgtttttctaggaatgttagatattcttctttagtcataactggagtaaaggtatctaatatatctttagcatccttagcattatcaaaaagaaggtctacaactgtaagtgccattgctttagcaggaattatgtaagctaaatcttcatcaactatttcaaaatctcttgtatgaagagctccttttacaccaccaatcatagggtgaagagtaggcattatatgagacacatctccaaaatcaaaagagcctgtaaaatctccaccatcaataacttttccttttagacctaaatcttcaagattgtttttaaataaattatcaagacttttgtatcgtaatattggaagatatccaggaatttcagttatctcaacatcagctccaactgccattccaccagccatcaaagccttatttattctttcattagcatcaatcataccatttatagttctagctctaacatatgattccatatgaacatcagcaggaacaacatttactatatctccaccttttgtgatgatagggtggaatctaactctttcagactctttaaaagtttctctaagtgcattcacgttgtttatagcaagcattgctgcatttaaagcatttattccatcatgtggagcagaaccagcatgagattctttacctataaatttaaccttttttccaacaaatccattactctcaggaccaactagagccttatcttctcctaaatcagaagcatgaaacatcatagatatgtctatatcatcaaaataacctctttttattaattcttgttttccaccaaaataagttatttttccttctttttttaattgctctctgtattccaactcaataaactcttcagcaggagtagccataaaagatactttaccatctaaatgttctaaaacgccactttttactaaaccaacagcagcacctaacattccagctatttgaatattatgtccacaagtatgagaagcacctatttcattagcatctttatgttctttacatgatataccatccaattctccaagtatagatatatgaggacctttcttgctagaatttgcatctgctttgcatcctgtaactgctatatttttttctacagataaatttaattcttgctcaaaaaagtttgaaacagcttctgtagttttaaattctttatatccatattctggatttttgtatattccttgacctatttttaatattttttctctattttcatctatagtttttattactagagattttaattgttctttattcataataaattcctcctatattttaccttgaatacttaaaactatatgagctatactcgcacatgcaaagaatatagttgtaaatacaataagtgaaattataactattttccatgacatttcttttaaagcttctattttgtttccaacagaaattcctgcaaaagctagtagtggagtagttatagccataaagttaatattattagtgttagttaagaatacttcagatgttggactatatggcatactaagtaaaaggccgattatagttgcaaatccaaaagctggaaagattgatttaggaaataaatcttttataatcatagctgccatagcagctaatattagcatcaccataccaggaagagctgtaactatagatgtaccaacgctaattctttgtcctataagaattataactccaataacagacataaccaataattgatatgaacttttctttaaatttaaattagcaaacatttattagcactctccttctgtagatttaatttctttagtttttttatttctcgaaaatttaggttctaaaatcttatacataaaattagtaaatggtaaggatacaaaaactaagaatataattcctgttatactagacatcatattgcttgttgcagcataggcaagtattgtatctgccatttcaggtggtaccatggtagataatgaaccagcagctgctgtcatcatacttccactaccaacaccacaggccattcccaaagcatatgggtgaagaccactataaatagatattgaacctagtacactaaagtatatagtaccaagaactgttcccattaaatatgtaccaagtacaccactaccttctggtgagtttatcccatatttttctgatataactcctaaagaaggttcacgacttatacttgcagtagctccaacagcttctcttttcattccaaacattaatgcaagaggtaatgcaacgattggtgcaagtatatgaccaaattcttgagcgataaatgctggtccagcttgaattattttgtcaatgtttggtccaactgtagtaccatattttataccaagcattactagtgcaattccaacaacttcaccagcaatatttatttctttttctccaaccacttttttaagtgctttaatttttttacctaataaatctggtgttattataagtccaattataactgcataaagcatagggaacagtactatagaggcttttccaatagctatagttctttgccctataaattcacatattactaccaagattaagcaagttaaaaatacttgaataaaatgttttttattaatttccatgatttcctccccaaaagaataaatattttacttatctgaaatgagaaaatacgttttcttaagtataatacgttttcctaaataaaatgaaaaaactatttcaaataagtttcagaaatgtcaataacatgtccttaattaaggataaaacaaaaatttaacattgtcaacgaaaaatatctaaaatattacatattttgaatatattgtaatatagctttattatgaaaaaattgtttaaatattgtaggaataatagctaaaaagctttaaaattagtaatataaaattgaaaaataataatatagagttgagaaatagtaaattgaaattttaaaataaatgagtggaagtagcttagtaaagtatggaaatgaatattacaatagaaaataaataatatgtaaagactttaaattaattttaagtattaagtacaaatactaatttttgatatagaaattgaataaagtaaatgataataagcaaatgaattaagatgataataagtgaattgatatagaaataagtaaattaagtaagatgataacaaatgaaatgataataagtgaattgatatagcaataagtaaattaagtaagacgataacaaatgaaatgataataagtgaattgatatagcaataagtaaattaagtaagacgataacaaatgagatgataataagtgaattgatatagaaataagtaaattaagtaagatgataacaaatgagatgataataagtaaattgatatagtaataaataaattaagatgataatatccaaagtgagaaagataatagaaagtaaataaaatcatgtaagaataatttagataagattctaagattttatttatttaaaaattagtatgattaatttagattaaataaatttaataattttagtaggtggtaatgaatgaaaataaatagattaacagaaataatagtaattctattaaataaaaaattagtaacagctaaagagttggcagataggtttgaagtttctacaagaaccatatatagagatatagaaactctgtctatgtcgggagtaccagtatatatgacgaaaggcaaaggaggagggatatctttaatagaagaatattctatagacaaggccatactgtcaaaaaaagataaagagagtttaatagttgcactgaaaacattacaggcgactaagtatccagaaataaattcagtagtaaataaaattggctcaatatttggagagcagaatttttcaaactggattgaaatagactttactgaatggggaagtaattttaatgaagatgataaatttacaaaaataaaagaagctattttaagacgtaatactataaattttaattatgtaaatagtttgtcaagccagacaaacagaactgtcgaaccactgaagcttatgtataagagtaagacttggtacttgtatggattttgtaaactaaaagatgattttaggatatttagaattagtaggataaggaatttatctataaaggatgaagtattttcaagaaagataatagaagaagtatgtttgaatgattctaaagtaattaaggaaaatactataacgttgaaattgaggtttaaagaaaagatgctttttagagtatttgatgattttaataaggatttaataactaaaaatgaagatgatacatatgatgtaattacagaatttcctattggtgaatggatttatggatatattttatcgtttggtgacaatgttgaagtacttgaacctaaagatgttagggataatgtaataactagactaagggagttgtctaaaatttattcattataatatgatgctagattaaagattttattaaatatataatatcttgcatttagtatataatatctcactgagtttaattatattaaaaatatgacataaaggtgtcgtatattataaattataattgaattagttcaaaataaaatatattaataaaaacaaagtgaggtataaagtatgaattatgaaatagtagagataaatgagaaaatagttataggaatatcgaaggagactacaaataaagatggacaagcggtaaatgctataggtgaattgtggaaaaaatttatgggcaaagggatatataatgctataaagggtaaaaagaatgacaagacaataggtctatatacagattaccagggtgattttacaagtccgtatagctttgttgcatgttgtgaagtaaatagtaattctgataaagagaagaatttagaagaattaaacactaataatactgttggagaaagtattattagtaaagttatactagcaggtaagtatgcaaagtttgttatagtaggaggtcaaaaagaagtaggagatttttggtttaagttttggcaaatggattttgataggacttatataagtgattttgaagagtatcaatgtaatacttttgatacaaagaaacaagaaattcatatttacataggaataaagtagatttgttattactatattgaatgaagtattgagtatagtacatttattatagatagttttactatttataactataagcagtaaatctgtaaaagatttactgcttttttagtaattaatagtatcagtatcactttgaatcttcagacatattcgtcatttaatattgtttattgataaatgatacttgtaaatataatgatttgttatttaatttaaaatatgaaaaaaagtattataaacacattagaatacttctggatttatgagtatacaatttgaaaaatataaaaaataatgtataaagctaaatctaatttaatcgataatacatatagagaaatataattaagtaaataaacaactatctattagatattgagaaagtcaaatcctatatgaatctacagaaatgattttaatgaatctgaaaaaattttttatacaaacataaaaaaggtataaagttgttttattataatttgattacttttgataactttttatgttttatacaattatatttttaataactcgtcaaaacgccaaacatatattacaatagatatataagtttttttgttgacaaattatgttaagagaattaagtataatatggcataaataattacttttatttatcaatgaaatgtatttattgtgtagcgaaaaatagtcagatagtatagacaataactgaagataaaagcgtttattgttgtacatatggaggagttagttttatggaaaataaaattttgatagtagatgatgctatttttatgagaatgataattaaagaagctctgagtaaaagtggctataataatttaatagaagcaaatgatggagaagaagcgtgtaatatatttaaatatgaaaagcctgatttgatgttgcttgatattacaatgccaaaaaaagatggtttagaggtgctaagagaaataaaaaagttggattcaagtgctaaggttgtaatgtgctctgcaataggacaagagaatatgattgtagaagccataaaacttggagcgttagattttatagtgaagcccttcaaaacagaaacattagttaaagttgtaaataatgttttaaaataaaagtgtaaatatacactgatacaatgaaaagcaaataaatgcaataataaaagggaggggtttatattataaattatttagaacttgatgatgttcatatagatgctcttagagaaattggtaatataggctctgggaatgcaattactgcacttgcatccatgataaatagcaatgtagaagtattaatacctatggtcaagatacttgaatataatgaagcgacaaatttgcttggtggtccagaaaacaaagtagtatgtattttactcgatatgaaaggtgatatcaatggaatgtttatgtttttgttggatgaatcaataactcaacttatgctaagttctctttttaataaagaagaagcttttttagatgagattgaggcaattgaaatttcagcaattaaggaaataggaaatattatggcaagttcatatgtaaatgctattgcatctatgttaaacatgactataagtgtttcaattccagatatatgtattgatatggttggagctgttctaaatgtgcctatgataagattttcagatgttggtgacaaagtcttatttatagaaaataaatttaaaatgagtgataattattttactagccacattttgatgattccagaaatgagctcacttagagaaatactcgtgaggttgggattagaagtatgaatagagagatagtagtgaacattgcagatatgaagatagcctatagaccaaatgttttagttacttatgcacttggctcttgtgtaggagtatgtttgatagataaagtagctggaattggtggaatgttacacgttatgttgccatatagtaaagatgctattaacattgaaaataagtgtaaatttgctgacacaggaataaatgagctcattaaatctatggagaatataggtgcaaatagaatatatataaaagcaaaaattgctggaggtgctcagatgtttttaggaagcagcaattcagtaattgcaagtataggacataggaatgttgaggcagtaaaaaaaactcttttaggattaaatattccaatattagctgaggacacaggtatgaattatggtagaacaatacgtttttacactgagacgggtgaattacttgtagattcaataaataaaggtaagaagaaattataatatatatttcatagaaagtgtattttaggagggaggtattaaatgagatttccagatgacccatatttagattatggactaattgatgaaggaattaagtatctaaagtttaaagtagatgagcaagattttggggttgaacttgaaaaggtaatagaaattactggaaatcaagaaattatatttattccagaactacctacatattctaaaggcataataaatctaagaggaaaaatcattccaataatagatatgcgtttgagacttaaaaaagatgaattaatgactacaaattgcatgtatatagtagtaactgaaataaaggacttggtagttggatttgtggttgatagagttgatgatatagtaagcttagaaaaaagtaaaatatcacctccaccaagagttactatagaatattcggattattttgtaagtggcgttggagaattagaaggtaaaataattactttactagatttagagaaacttttgacagataaagatgaagttttaatagatgaattaatcaatgggtttgattgcactatcatgtaacatagggatgtagttggagtgttattataaaaagattgtgatgagaacatttaagaatatagtggtataattattaagtataaaaattttaaatcattaaaatttgaatatattatgtttaagagaggtttgtatatgaaaaataagcaacagggaacaattttagtcgttgatgatagtgttctgatgtgtgacttaatagataaaacacttacaaaagataattttaaggttaaaaaagcatttaatgcaatagaggcaaaagaatttattgaagaatttataccagacattattttgcttgatataattttaccagataactctggttttgagttttgtaaggaagtaaaatctaatactcgtacagcagatatacctataatttttataacttcaaaaaatacagatacagacatagtaaaaggatttggtgtaggagcaattgactatatggtgaaaccttttagtatgacagaattaaaagctcgtgttatagctcatcttgaagtaaagaaatctcaagataaattaaaaaagataaataatgaactggaatcttctcttgaaaaattgaatagactcgttgtaagagattatcttacaggtctttacaataggcgacatataattaatcagcttatggagcaaagaagaattaataaatatagtgaaacatcaatatcccttatccttggtgatattgatgactttaaggttatcaatgatacttatgggcatgaagcaggggatttcgtgttaacagtaatatcaagtataataaaaaagaattgtagacaaattgatactgtatcaagatggggtggagaagagtttttgataatgctcacaaatactccaatagaaggtgctaagatactttcagaaagaatccgtaaagagataaaggagtttgatttcaactataaagaacataaaataaagtgcactattacattaggagtagtagaagtaaactcaaatatatcattagaagaaaacatatccttagcagataaagcaatgtatgagggtaaaaacttaggaaaagattgtagcgtagtgagtacaatgaaaggattaaaaaagatataaacttactttatgaaggagtacagatatgaaaagagaagtaaagctttctaaattagcaattgtattgctgattattatagtattggctgttctagcagggattttttcttctatttcatcttataaagcatttgaaaaagtagaaaaaagtattaatgatatgaataatttgaggactcaaagtcagtatataaaagatacaactagagagataagtgatgtattaagaagatatgtatttacaggagaaaaaaagaataaagatatttatgaaaaagaattatacggaaaaacaagagaatcagctttaaacaaattagaaaaaattggtcttacaaagagcgagtcaaataaaatcttagaagcaaaagaaatatcagattctttagtaccaacagaacaaagtgcaataaaggcagtcgaaagtaatgataagagtaaagctcaaagtataatttttggtagtgactatataaactcccaagagaaaatggattctttaataaatgaatttcaagaggatatagttacccgttcaaattccaaaattgtagaagtaaaaaaagaattacaaagtctaatattaagaacaatatttatactttcccttttaataatattgacaataatagaatatacagtaataaaattaaagatagtgattcctattaatagagtagaaaaacacttttcaagaattgcatctggggacttaagaacaagtatagacgttgaagaaagtaaatctgaaataggactattagtgagttctgtcaaaaagatgcaaagtatgcttttaaattacatagaccttatagacagtacattaactagtattgcaaaaggagatttaagagtagagatagaccaagaatttataggtgattttaaatcaattaaaatatctttagaaagtataataaactcttttaatggtgatttttctgaaataaatttatcagcagaacaagttgcaagtgcttcagaacaagttgcagcaggtgcacaagctctttcacagggtgctactgaacaagctagttcagtagaagaattagcttccacgattaatgagatatcagatggaattaagaagtgtgcagatagtgctagtcttgcatgtgaggtatctgaccaatctgcatcacaagttggttttggaagtagatgtatggatgatatgatgacatcaatgggtgaaataagtgaaaaatcgagtgaaatatcaaaaataatcaaaacaatagatgagatagcattccaaactaatattctcgcattaaatgcagctgttgaagcagcaagagcaggtcaatatggtagaggatttgcagttgtagcagatgaagttaggtctttggctggtaaaagtgcaaaagcagctcaaaatacagctattctcatagaagaagctattaaaacagtagaaaatggtgtcagaattgctaaagagactgcaaatgcattggacttggtagtaaatggtgtagaaaaaactactaattatattaatggtatttcttcggctgtacatagtcaagaagtagcaattacacagattttatctggaatagagcaaatttccatagtagtccaaatgaactcagcaacagcagaggaaagtgcagcagcctcagaagagatgtctgctcaagctcaaattttaaaagaattagtagaaaaatttcatctaaaggaaagtgaagtaagagaatcatcatgggtttaaattatgaggtgaatattgaagtaagagaattatcatgtatttaaattatgaggtgaatattgaagtaagagaattatcatgtatttaaattatgagatgtatatatattgaaataagagaatgattgtgtatttaaattatgaggtacatatagtgagataagagaatcatcaaggatttaaattatgagatgcatatataatagaaaattatttgtaggtcgtaggtgataaatgtgaattatattgaaccgagtatgagacaaatgttagatatgtttatatttgagacaagtttattactcgaacaattagatgaaattatgattcaaatagaaaaagagaaagtatttactcataacaacattaatgaaacttttagaataatgcatacgataaaaggttcagcatctatgatggggttagacaatatatctgctttagcacatagtgtagaagacttgttttatgctatacgtgaaggtaaaatagaagttttagacaatgacctattatttgatttagtctttcaatcattagattttataagaagagatatagatgagctacaatcaagaggttgtatatcttctgattactctaattttattgaaggaattgaagagtatgtgagtactttggaattatcaagttctatgaaatcaaaggataatgcaaatttagaaagtacagacgaaaaagaagcaatcgattcaaattttgaatacaaagaagactctgatgtagtaaaaataatctttgaacaaggttgcatgatggaaaatgtgagagcgttcatgcttgtatttgaacttagagattactgtgaatttatagatttttatccaaaagatgtagaaacaaatgcagagtctacagaatatattaaaagttatgggttttatatacaatttgtagctaaagaggataaggcaatagtttataaaactatagaagataatctctatgtaaaagaatacataaatattagtaaaaaagaaatagaaatgaaaaatacatcaaataatgatgcagtagaaaataaattaaaagataataataaagtaagtaaaagttatcaaaataactatacagaagatgagatacaagaagatgttttaaatgaaaaaactgatatggaaaaagatagtctaagtgaagaaaatgaacatttaccaataagtaagcagagtattatgagtgtaaatttagaaaaattggatttacttcaaaatatagttggagaaattgtaattatggaatcaatggttgtaaatagcgtaaattctacaggtgttgatatagataatttcaataaggcaacaagacaattacacaagcttacagatgaattgcaagatatagtaatgtctatgcgtatgattcaaattgctggtgtatttcaaaaaatgcatagaattgtacgagatatgaataaaaaattagataaaaatgtagagttaataactataggagcagagacagaggtagataagaatgtaattgataatttagcagaaccttttatgcaccttataagaaatgctatggaccatgcaatagagcctattgaggagcgtatagcgaaaggtaaagaagaagtgggaaagatagttttatctgctgagaatctaggcggagaagctgtgataagtatttcagatgatggtagaggcattatgagagataagattttggcaaaagctaaggaacaaggtcttcttaaacatcaaattaatgagtatactgatgacgaggtcaattctttgattatgactccaggtttttctacaaaagaatctataactgaattttctggaagaggagtaggcatggacattgttcgtaaaagtattgaaaaagttggaggttcaattgaagtaaaaagtaaacaggatgaagggacaacctttactataaaaataccattaactctttctatagtagagggtatgaagtttaaagttggagattcactatttactttaccaatatcatccataagaagaacatttaaacttacagacttaaatcaaataattacagaaggaaataagacagagttaattacaatatatggagcatgtattcccattataaggttacataaaatatataatattcaaacaaaagtaaccaatctgatgcatggtaatatgataattattgaaaatgagcataaagcagtatgcatttttgttgatgaaataataggtaatcagcaagttgttgtgaaaccatttccagtttatttcaaccgatttaatataaaaaataagggtttatcgggatgtacaatacttggggatggaagtataagtttaattatagatgcagatagcattatagaaatatattaggggatttaaagtatggctaaagatgaaattattaaacaagtattaacattttatgtaaatgatgttatttatggaatagaattagaaaatgtgattgaaaccataagatttcaatcaataacgtatgtaccatgtcttccaacatatataagtggagttattaatttgagaggaagaataataccagttattaatatgcatataaagtacaatcttcctaaagctgattataatgagagaacttgtataataattacaaaggttgatgagtatcaagttggaattattgtagataaagttgttgatgttattcatatagaaaatctaaatttactagagacgactaattctaacaacactaatattaataaagatataaaagagattgcgaaagttgaagataattctatattaattttagatattcgaaagtttttgattaatagcatatagttagttctgataaattagcaggaggaagtttttgcatgataaaactcacagatgaagaatttatagttcttgtaaaccatgtaaaaaaagaatatggtattgatttaagtaaaaaaagagcgttaattgaaggtcgcttatacaatacaatgatagagaaaaaacttagttcttttagtcaatatatgaatctattatttaaagataagacaggaaatgaagctataaacctaataaatagattgagtactaaccacacattttttatgagagaacctcaacattttgagtttatacagaatagtatacttcctttttgggaagaaaataataaaataagaaacataaatatatggagtgcaggatgttctagtggagaagaagcgtattcaatagctatgactttggatgattattttggatataataaagagttgtggaacattaaaatcatagccacagatatttcaactaactcacttgaaaaagctaaaagaggtatatacatagaatcaaatgttaacaatgttcctgagttatggaagaagaagtattttatagacaacaaggatggtacatttaaaatttgtgataagattagaaaaagtgtaatttttaagtcatttaatttaatgaatgatttctcatatcaacattttgatttgattttttgtagaaatgttatgatttattttgatttaaaaacaagagaagaacttataaataaattttataatgctaccaaaaaagatagttttttgtttgtaggacatgcagaagtaatcaacagaagtagtactaaatacaaatatgtaaaacctgctatatataaacgataaaaaggtatttttgatatatgattttttggaggcggtaatgtggaacgttttaataatatggttattgctataggcgcatctgtaggtggtacagaagcaatacttgaaattataaaagacctaccaaaatcaacaccagggattgttgtagttcaacatatgccagctatatttacttatatgtatgcacaacggcttgacaagcagtgtattatgaatgtaagagaagctaagaataatgatagagtcgaacaaggaaatgtgttaattgcacctgggggttaccagatgaaattgtgtacggataaacaaggatattatgtaacttgtgaaaaaggagaaagaataagtggtcactgtccatcagtagacgttttgtttgattcagtagcagaagtagcaggtaaaaattcaataggaataatacttacaggtatgggttatgatggagcaaatggacttttaaaaatgaaagaaaatggtttatttacaattggacaggatgaaaattcttgtatagtatatggaatgccaatggtagcttttgatagaggttctgttatgttacaattacctcttggtgaaatttcaaactgtttgataagacatattaatattttaaaacaaaaagattaattttttataaataaaaattaatcttttattaaattatatggataaaaaaccctagaaactccaaatataataagagagatttatatttaggaggaaaatgataatatgaaattttttaaagtcgatacaaaagctaaagttttaagatatgtatttgttttaacattgactataatggctgttttggcaattaaacatgactataaatataataatttaaggaaagatgcttcaattaatttaaatagtaataaggaagcagtgactgttatgagtaaccagtcattaccaaagggtaatacaaatagtaaacaaactttatcagtaagtacaataggaagtaaaacaatagtgaaaaatgatgagtatttagaaagtactataaacatgcctgtaataacaaattcaaataaaattgttgaaaggtctacaaatgataagataaaaaatgacatatttgaattttataataaatcatataaagaagcaaagcagtatcttaaggataatcctgacgagaaaaataagtttgttgcaaatgtagactttgaacttaaaaagaatactgattctgctcttagtataaaagtgagatattatacttatagtggtggagcacatggattttatcaagatatagcatataatgtggatatgagaactggaaaatttttagaattaatggacttatttaaggataatactaaatataaagaagttatagatgaagaaattaaaagacaaatagctgaacttgaaaaaaaggatgaagaaaatatcggaatatataattttaaaggtataaaagagaatcaaaacttttacttgcaagatgagaatctagttgtatattttgatttatatgatataactccatatgcagcgggaataccagaattttcaataaataaagcgttgataagttctatgctaaaaccagagtatgtagatttatttgatttgaaatagaagattaaattaaatgttatgctataatatttagcatagaaacttattaaaattgggggtataaaaatgctacttttaaaaaaagacgacataaaaaaagtatttacaatgagagatgcaattgaagctgataaggaagcttttagaatttattgtgaaggaaagagtgtaaatcctttgagaaccaatatatctgttccaagtcaagatgctagtatgttatttatgccaggatacgtagaagaattaggctgtgggggaataaaaattgtatctgtatttcctaaaaatgctcaaaaaggcaaaccagtaattccagcaacagtactattattagatggagaaactggagaagttagtgcagtattggatggtacttatgtaactcagattcgtactggagcagcctctggagcagctatagatgtattggctaaaaaagattctaagattggagctttgataggtctaggaggacaaggtgagccacaacttgaagccatgatagaagctagaaatttggatgaggtaagagtttttagtagaaacagggaaagtagagaaaaatttgcagaagaaatgaacttaaaattaagtaaatataatactaaaatagttgcagttgaatcatctgatgaagccatagataacgcagatgtgatagttttagctactccatcaaaacaaccagtacttaatggaaacttagtgaaaaaaggagctttaataagtgcagtaggttcatatatgccagatatgcaagagttgtgcccaaactgtttaactagagcgtctaagatattttttgaatcaacagatgcagttttatctgagtcaggagatatattaattccattaaaagaaggtaagataagtaaagatgattttagtggtgatttaggaaacgttataaatggaactattcctggaagagaagatgatgatgagataattgtatttaaaactgttgggataggtgtacaagatgtcgtaacagcaaaaagaatatacgataaagcaaaagaaaacggtattggaatagactggaagtggtaaaatattcaaaataattctatagttagacaaatttatgttataatgttgataaataaattttttattattttaattgagggaggatgtttgtatgaaaatggtaaaaaagttaatattgtctacgattatggctctagttttagttctaactatagggtgttctaatgcagaagaaaaagtaaagtcgaattttgaagctaatttagctgcattagaaatgtataagtatgatgaaaaaggaatttctgatgcattaacagaagctgaatataaacagattcaaacttataacagcaaggacaaggtttcaatgattgctcaattgacacctctttatggtaaagaaaatgctgaaaagatatacgaaacaattgttaaattaattcaaggtgttgaaaagacagtaacagtggaatcttctagtaaggataagataactttgaaagttgtaagtaaagctttagatactagtaaagtaatgagtgaagcgaacactttagtaaaatcttatgtaactgatgaaaagaattacgataaaaaagaaaaagaagttcaagatgatatgacaaaaatgattatagacctttacaataagaaaccaactaaggaagttacaactatgattacatatactaaaaaagatggtaaatggcaaccacctagtaatatacaaaagttatgtgaaggaatatatacaatttaatttattttaaagacacaaaactatcttttaagcatataataaaatgtttggaagatagtttattttattttcaaagtataaattatattttataaatgatttattttataaataatttatcttgataaatagtaaataatttactttactaataataaataatttatcttaccaattaatttactgtattaagtaatttttttattaaataatttgtttactaaataaagtacaattaatagaaattattttattacttgttgaataattaatcaaatttatttgatgtatttggtaatgttgactatataaaactagtaatacaattatggcatatcttgataaaacatggtgaataattgtatcttatatagtcgaaaatatgatatattaatattatacgttaaaagattatttatatttttaaaagtttttttataaaatgaaaggggtgttttttatggtatcaaggcaagaattaaaacgagtatctaaagctcagttatctggaaactggggaatatgtgcaatttctatggcagtatatattgcattgatagtattaatatcaattgtaggattaccttttgaaccattgactactattgtagtggctgtaatagctttttgcgtttcagcaggatttacatgtatgttcttgaaaattactaaagatgaaaaagtcaagataggagatatctttgtaagtgggagaatttatttaagaagttttggtttttatttatttgaatcaattattgtttatatttattcttttataatcacaattataggagcgtttttatcatttggagttttacttactagtggagcaattgaatatttatcaagtgataatgttggaatagggactattatttctactggaataactctagttcttataatacttgttcttatgttaccggtttatatattgctattatatgtttctcaagctactttcttaatttgtgaagacaaggataatatgggtgtatttaaatcaatgggtgctagtttagatatgatgaaaggaaatgtacttaaattatttgtactaaactttagttttataggatggtatatactttcaatagctactcttggaataggtctactatggctaattccatatgtaggtgttactaattgtaatttttatagacaattagtaaaagaaaacccagatgtagaggatatactattagataaagaaaaatcttatactatgtactaagatagatagttatacatttaaataaaatatggctttaattaaacattaaagtataacattgataaaactgtcttttataagaattttttaaaaagacagtttttattattaaaaaataaatgattgacatagtatagactactatgatagttttttattatagtaatgactattgtgataactatatttgaggagcgattttatatggagataaaattatttgattcagaacttaaagtaatggaagttctatgggagagaggagaaagcaaggctggagagttagtaaaaattttaaaagaagaaacaggatggaatagaaacactacgtataccgttataaaaaaattagtgtcaaaaggtgcaatagagagaattgagccaaattttgtttgtaaagctttaataagcaaagaggaagtacaaaaacaggaaacagaaactttaattaataaaatgtttggagggtcttcagaaaaatttctttcagcttttattaataaagaaaatctttcaagtgatgagattacaaaactcaaacaaattgttgaaaaattaaagtgaggtaagatttatgttcattaaattgttagaaatgagttttacttctggagtattacttttaatagttatttttataagagcatgtttatttaaaaaattacctaaaaaggtatttgtattattgtggttgattgttttatttaaacttctaataccagtaagtttaaattctggttttagtatttatagtataattgaatcgacttttgatgtagaattgggtaatacatcaacagaaaattatactcttaagaaagctagtgactctacaggtaaaaacaattctgacgaatttgaaataatgtctaatattgaaaatattatgatgttggaaatgttgggcattttgtcttttatagttactattatgtttagcatacttttatgctttagatattttaaaataattaatctttttaaaacttcaattcatataaaaaatcatgagttcattaaaaaatggatgtgtaagaatagccgttttagaagatttattgtttgcatatctgaatttactaggacaccacttacatctggtattttaaaaccacgaattattttgccaaagcaaatgaattatgctaataatcaaactttagactttgttttaactcatgaaatggttcatattaatagctttgataatctgttaaagttatttatgcttgtagctcttgttgtccattggtttaatcccttagtttgggtgatgttttttttactaaataaagacatagaatttagttgtgatgaaaaggttatgagtatacttggtgaagaatatagggctgattatgcaaccacactaataagtctagcagaggagaataatccattttcaatgacaatatgtagtggatttggaaagacaaaaatagaaaagagaatagttaatattatgaaatttaaaaaatcaacttatgttacttttttagtttcaactgtattagtttgtgggacaggtcttgtttttgcaacagaaaataaagagattaatgaggttgaatcttttggtttaacaaaaaatgaacaaagtgataaaagtggattttcaataagtagtaaatcaactgatttatattctcccaaagtagaatctgatattcttgttagtaaagctaaaagtgatggagagactcattttagtacggcaaaagtatctgtaattgaatttagagagcatgaagaatcatctatgagcaaagtaactaattctgagaatagtgaagaaacgtatgtaaataaatctagtaatagtaaggatgtactttatactgattcaggagaagtttcaattgagcaaagtaactataatgataatcgctttgtcatatcaagaaaagggaatttgttagcagttaataaagaacaatatagaacatggatagagtaaccataaatcttagtaatataaaagatttagaattaaaatactatctcaaaataattaattttgttttgagatagtattttttattgaaaagttttttaaaaagacttgacacaaatatgactactatggtagtctaaagatgtggttgataactattgcaatagtcattttaaactacactacccaaataaatctctaagaaaggaagattggttatgaaaataaaaaaatcccttataagtgcaatgatggtatctgcaatggtactaggaggaactggagcagtatttgcaaatggaaatgattcatctaatattgctttacctaaacttgaatctctaataaaatcaggaataactgaccctactgaattggaaaagtatggtgttgagcattatacttatgaagagtatgctaaacatattcaagaattaaaagactatgctaaagaccctaatgcagtcaaagatgtaagtcaaaaagaccttgaggaaacaattaagaaaatggaacaagaattagaaaagataaaaactgaaggattaaaaattatgaagcctatcactatagaaaatgaagatgggtctcaaatttcaattgcttacaattatgcagcaattgactaatgttaaatataatctctaagatatttcaaaatcctaagtaagtatgattaaatacattaagctactgtaatgatataaacatgcagttgatgattatttaaataattatcaactgcactacccaaataacacttaagcttgttaaaattatgtaataaaagtatcaaagaatttagacaaatgtaattgaacatatggagtgagaataaaataaataagactcaaataagtaataaaaaaataaagtctaagttaaaaataaagtaagaagtagaataaaagtaaatcgagtcaaagtaaaagtattaaaccaaatttataatgttaacattttttaatgtatgttaagaaatgttaacattatttttttttcttaaaaataataattgaaacattctgaaaaatataacgaaaattaaatattatctattagattcattaaaagttaaagaaaattagcattttaggatttttaagatttgtttaaaaaaatcaaaatttattggcatagtaattgcttaatacatagagtaataatatgattataaatttattgattaattttattattatttttaaggggggagagtatttgtagttataaagcatattgggaataatgaaaaaggttaaaaacatattactataaagtatagggggtaggttaaaagagtaatcataaaataaatatacggataatagtagataagaataccagaaaaaaatagatagttaaagggttagggtgaaagagtaatcgtaaaataaatatatagataatggtagataagaatatcagaaaaaatagataattaaagggttagggtgaaagagtaatcgtaaaataaatatatagataatggtagataagaatatcagaaaaaatagataattaaagggttagggtgaaagagtaatcgtaaaataaatatatggatgatggtagataagaatatcagaaaaaaatagataattaaagggttagggtgaaagagtaatcgtaaaataaatatatagataatggtggatagagtagtaagaaaataaatagataaagggatagaataaatttaaatatggaaaatgaatatctaataataagtgattaataaataattgtagatagattgtaaattaaataaatctttaatagaaaggagaactatttatatattaaatagtatttataaatatgaaaaaaggcgattttatatggagtggagttcttatttgtattattgctgtcttagcaataccaagtagtagagaagtatttatggaagcaacaggtgcacatccatatattgggggttttttaaagtttgctgtattagctacaatgggagatttacttggtgctagaattttgtataaggattggaaaataccagtaggagtattttatagagcaatagtttggggaataataggtgtagttaccacatatggaatgtcaatctactcatcaggtgtaggtcaagcacaagtggatggtatgcttccatttgagggaatagcttttgcaaatgctctatttaagagtgcaactatgaatatactaatgtcaccaactgtatttttattccataaggttatggactgttttatagataaaaaatatgaggttggaaaggggattaaggtaaaacttaaagatgtggtaaatattgtggactggaatgcttaccttggttttagtgttttaaaaactataccatttttctggataccatgtcatacaattgtattcttattccctgctgagtatagagtaattgcttctgcatttgcatctatagctttaggtctaatattggctttagctaataagtctaaagttgcagtttaggttcactgatgaagataatagtattatttaaattatgaataactttttaaattaatattatttatatttataataaataataatttagataagaaggaatattctaagtgatagatagtgttttaaataataaggagtaatattctaagtgagaagtagcattttaaataataagtgagattttaaataaaaagtaagcttttcgttagaatagcattttattaaacttaaaaataaatataatattttaaagaaatctaagttgctaagcactgtttttaagaagcttaaaatcccccatttaaagttttaagattctaaaaaaacaagttataactaaaaaatggctgttaagactacaatacttataagtaaaaatacttatggtatatattagttcataacagccatttttattttaaattaataattttattcaataatttgagtttatgttctaaatcaagctttaaattaaaggatttaaagaagctattctagttgtagctacataaactctggatatttcataccatgttttaaaatctactactccgctttgaggtaaaccaaagattccttggaatatcttaacagcgttttctgtatctgctccatagataccatcttctataacttttggtacagctggataagaattagatatagcatttaactgattttgtatggttctaacatactgcccagaagaaccaacttgtagtgtagtaccagggaatgacactggtacaccacttactataggtgctctttcaaatactatctcatctccatagaaatatcttaggatactctcatagtcatatccttggtcacctaagtctttactgccccattgagtcatttggtcaggacattgagatttttgtccatcacaatattgtgctaatagtggctgtcttgatgtaggaggtctttttataaaagtattaaaaatagcatctacaactacgttaattggttcaaataagtttctattatttataaacttatggtcgtatgctgttgttgaagttattgtaaagttatatcctttatttctataccattcagtaaagactctatttaaagtaaatgatattatagctattacatttgcatagattgtctgttcaggccaagttgaatatatttcagatgacgctatgtttttaatgtactctttaaatggaatccaatagtttggagctgatgaatcttctggcaaaccatcatgaactactataaattcaggcactacagggttatctaatacaacgaaaccagtaggaggtggtaatggttttaagttactttctggaatcttaggaggataagtaccatatagagtatgttctcctatgtcaaaaatcaactcactttgtcttgagaaagaacgcttacttcttgttctaggagacatgggaactccttgtcttgctacaattgtagctaacaactgcgttccttctatgacaactgtctcatatccatctgctatggcttccactatatactggctataaggtctaacatcagatggctgtagagagtaatctacatctggtgctggtaatactaaaccagtcacttgaccagattcattacttcttaggttttggtataaagttgatgagctttggctaccattagacattgaatatatgtttactactgcattttgaataggtctattgttagtagcatcaattatgcttactgttaagaaaccatcttgcatcaaatcaccctttctttaaatgaatttagttcccttatatttcaagatatgaatatagcttgaaatttgttaaataatatagatataaatttaaatttttttgagtatttgagtatatttgtatttaaataatttaaaataatttaatgtatattttagtatgtatttaaaacacaaataagctaaaaataagtagatgatataaatcataaataaatcaaaaattttgaaaggaaaataatctatgaagctagatttatttttattagcaatagttcctatattgatagggatgttttggataaggtctaaagatagatattgtagagaacccctaatccatctaattaaattttttttaataggtgcttttctaagtgttataattatacttttagaaaatttactgatgaagtttaatgtatttgaagggtattcagaactaatatatgtatcatttgtagttgcaggacttgtggaagaaggtgtaaaagctctgatactgattcctgccctaattaaagaaaaacactttactgaaaagttagatggtattatttactctgtatttttagctttaggatttgcaacaattgaaaatatggtttatattttttctgaaagtagaaatctagcactgcaagttggtattaatagggcagttatctctataccagctcatgtaatgtttgcaattactatgggctactatatttctaagtataaatttgagggaaataaaaataaaagacgtgagtatttgtttatggcagtgttaattccaattttattacatggagtttttgatttcatattgatgatagaatatagatgggctattatattacttatagtttatgtaataattttgtggaagataaatcttgataaacttgagaaatatatgaatcactctaaaaaagtgtttttcggtaatcttaggaaaaagaagaagaaataaaatttaaaggaaagacataaataattaaagtataataaatgacacacaagtaaagcagattgaagggggattatagatttgacagaattaccaaaggaatttttagaagatattgaagaaatactaaaagatgaatatgatgattttataaaaagttatgaggaaagtaagactactgggcttagaataaatactttaaaaattgacaagaaaaaattatttgatttggagttgtttgatttgaatcaaataccatgggcagaagaaggtttttattatgatgataaaattgacagacctggtagaaatccactgcatgaggctggagcatactatttgcaagagccttctgcaatgagtgtaataccaaaggcagatattaaagagggtgaaaaagttctcgatatgtgtgctgctcctggtggaaaatctacatatatactatctaagctaaacgatacaggtttattggtttctaatgaaattaatgctagtagaattaaggctctaggggaaaatttagagcgatttggagcgagaaattgtattataacaaacaccgattctaatagcttaagaaagacgtttaatgggtattttgataaggttattatagatgcaccttgttctgggcaaggtatgtttaggaaggatgaggttgccatatcagattggagttatgcaaaggtagtagaatgtcaatccatccaaaaagagattatcagagatggatataaaatgttaaagaaggatggcattttaatttactcaacttgtactttttcaagggaggaaaatgagcatgttataaatgagtttatcagtgaatatccacatgcagaacttattgaaatggaaagattatggcctcataagataaagggagaaggtcattttgttgccaaaataaaaaaattagaagaagaagaatgtaatgtcaaagaattaaaaataaaaaatttagataaagaaataaaggattatagggagtttgaaaagaaatttttaaaggttgatttttatagtaataaaaaaaataaattttatttaagaggagaaaatttgtacctacttcctgaaatatatccagatacgaaaaaactaaaagtattgagatacggtttgcatttaggggttttaaagaagaatagatttgagccttctcatgcactatctcattacttaaaagttgaagatgtaaaaaatgttgaaaacttcagtgtacagagtgaatcaattcttaaatatttaaaaggggatgttgtgaattctaatgatagtagaggatgggttttggtttcggttgaaggaatacctttaggttggggaaaagaatcttctggtgtaattaagaatcattatcctaaaggtcttagaaaagtattttaaactattagaaaaaagaagtataatatttatattgtaggtttatggtagattattttgctgtagattgacttaatatttaacacagaggagacgattttagtgggtgaagcagttaaaaaagaagttgtagaatggataaaagtgattgtcatagctcttgttttggcatttgcaataactcgttttatagtgccaacaatagtcaaaggagaatcaatgtatcctacattagttgaacgtgattatttgatagttaacagaattgcgtacaaggtaggagagccaaaatacaaagatataatagtatttaaaaccgacttaacagaggaaaatggaaagaaaaaagatttagtaaaaagagttatcggggttcctggtgaccatgtaaaaatacaagactccaaggtatatgtaaatgataagttgttagatgagacttcctatatacataataatcgtactgatggagatattgatatcgtagttccagaaggaaaattatttgcaatgggagataatagagaaaaaagtttagatagtagatacgatgaggttggattggtcgacgagcataccattttaggaaaggttctagtcagattgtatccattttctaagataggaactattgactaaacatataaaatttggagcaatcgctgattagctgaaatcaccagaccatacacaatagttgtctatataaaaaagacaacaccttatttagtagacttatctaaaagatagtgtttaagagacattatcaataaagataatataactataaaggagaatttgtgaatgaatgaaactattaaagaagagattgtagagtggataaaaataattattactgcacttttttttgcatttattataactcgttttataaaaccaacactagtaaatggagaatcaatgtacccgacacttaaatcacatgattatttggtagcaaataggatgacatataagttatcagaaccaaaatgtggagatataatgatatttaagactgatttattacaagagaatggaaggaaaaaagagcttgtaaaaagggttataggtgttcctggtgaccatctaaaaattaaggattctaaggtttatataaatggtaagttattaaatgaagtttcatatatacatgataattatactgaaggcgatattgatatggtgattcctaagggaaaagtatttgcgatgggagacaatagagaagttagtttagacagtagatataaagaagtgggattggtagatgaagaaaatattaaaggaaaagttattttaagagtatttccttttacagatataggtatttttgagtaggtgatttgtatggcagttggtatagcgtccttattgtttaatattgaggaggctttaaacatttgtgagagtataaagcaaataactcatttagagattggaattgacaatatatctgaatgtagcgagttatgtaaatataaagagagaatttctaagttaggattatctatagggatacacttgcctatggaattaaatacttgcgaaaacatagagtatatacgaaattcatggataaattttattgagaagatagaatttgaactaaaaggatttgatataaggtattttaaccttcatttgggatatgttatgacaaatagagttagaaagaatagagacaaatatttaggaaatagtgtggattttttagataaattaaatacaaattcatatgtatgtatagagaatacttattcaaaaggtggggatttttcaaatattggaaatatatcttatgattttgaatatatatttaagaggattaaaaattctaagatttgtttttgttacgatactggacactgtttaattgatgaggatgcttatgtaaagaacttaaaggataaaataagactgatacacttaagtgataatgatggtatcaatgatacacatgttggtataggaagaggaattttatctgaagaggggattaaagaggtcttaacattagatgcagaatatttagtattagaaataaattacgaagacattgaagatactataagtaaattgaataatattgtaagagagggttaaatacctctctttatcttgttgatatgcctcattaactaaaatttatattcatcaaaaggaaggagatgttgaagtgaaaaaaataaacttaaaaatagaaggaaaagataaggaatattcattagaagaaaattcccctggaatcagattgggagatatagcgaaagaattttgtgatgagcataagggttatataacacttgcagttgtagacaataaactaaaagagctaaattgtagagttaagaaggattgtgagataaattttttagacactactaatgaagatggagagagagtttactttagagtcatgtcatttatatttgtaatggcttgtagagaaatcttttgggatagcagagttacaatagaacattcactatcagatgggctatattgtgaagttcatatagatagaaagcttaaagaagcagatgttgaaaatataaaaaacaagatgaaagagatagtaaacaacgattatgttatagaaaaaattgaagttacaagaaatgaagctatttctatatttgaaaataatgaaatgtatgaaaaggcagagcttttgaaatacaaagagtatgatagtgctaaagtatataagtgtagaaactatatagaccatttttatggttatatgttgccatcaactggttatataaaatcatttgatattaagctttataatggaggcgttataattttagggcctagtgaagaagataagactcttcctatgaagtttgtacctcaacctaagctatcaagtgtatattatgaagcagaagaatggtcaagacttatgggaattgacaaggtagtatctcttaacaaaataatagaaaacaatgaatatggagatataataaggacattcgaagcattgcatgaaaagaagttatcccaaatagcggatatgataaaggatggcaataagagagtaattttaatagcagctccatcttcatctggaaaaacaagttttgctcacagattatcaatacatcttagagtaaataatttaaatcctatttcaatttctttagatgattattttatagatagaaaacatactcctttagatgaatatggaaattatgattttgaatcaatttatgcaatagatttagagaagtttaacttagacttaaagaaacttttagctggtgaagaaattgatgatataagattcaattttaaagaaggtaagagagaatacactggtaaaaaaataaagatagattcaaatcagccaattatattagaaggtatacatgggctaaatcctattttaacatcatctataccagatgaagataaatttaagatatacataagtgcccttactcaaataaatttggatgaccataatcgaatccctactgctgatttgagaatgataagaagaattgttagagactataattttagaggatatagtgctgataatactattttacaatgggcatcagttagaagaggagaaaagaagaatatattcccgtaccaagaggaggcagatgctatatttaactctgcttgtgtatatgaattagcagttttaaaacgatttgcgaaacctttgttggaagagataaaggaagataatcctgcacatattgaagctactagattactaaagtttttgcagtattttgttgaattggacgatacttctgacataccaggtatttcaattcttagggaatttattggaggaagtaaaatagttgattaatatgtgtattatagattgttttatgaagattaaatggcatagcaagtagtgtgattggtttatgttaagtatattaagtgtaaagtggagaattaaattgatacagattttaaagtttgagttgatatataaaaaggcttgttttatacttttgtatgaagcaagctttttattttaaattttacttttttgtttaatattttgttagtttatgtgataattttttaaaagagtaaaagagtaaaagagtaaaagagtaaaagagtaaaagagtaaaagagtaaaagagtaaaagagtaaaagagtaaaagagtaaaagagtaaaagagtaaaagagtaaaagagtaaaagagtaaaagagtaaaagatgttaggttagaaatttttgacgttataagaatttaaattactggattattagattactaaattactagattattaaattattaagctatttaaactgtttaaattgtttgaaaaatgaattgattcttgtagaaaatagttttaaagtataattttttttaacactgttttattatagtacaaacttgtgctaaaatagaatatataacataatataagaggtgcatatgaatacgttagatgagacattattaaaagaaattataagttctaataagaagtatactaattatgggcaagtcgctagttacataccagaattaaaaaacgctagaagaaatgatttaggaatttgtatcatagatagcgaaaataatctttatagtgctggaaactgtagcacaaagtttactatacaaagtatttcaaaaccaattgtgcttgctatggcacttatggataatgattgggaagacgttttttcaaacgttggaatggagccaagtggggacccatttaattcaataatgaaacttgaaattaatgacacaaaaaaaccctgtaatccaatgataaatgcaggggctatagtaactacttcccttataaatgggagttgtttagaagaaaaagaagaaagaatgcttagtttctttagaaagttagcaaaaaatgataatataggaataaactatgatgtctataagtctgaaaaaatgactggagatagaaacagagctatggcttacttattgaaaagtgatggatttatcagagggaatgtagaagatgttctagacctttattttaaacaatgctcaattgagatagattctgtagatttagcgagaattggaataaatcttgcaaattatggagtagatatagaaaatggtgagcatttaatgagtgaaatggtttctaggattgtcaagacatttatgatgacttgtggaatgtatgatgcttctggggaatttgctattaaagttggcattcctgcaaaatctggagttgggggtggtataatggcttctgtgccgggacgcatggggattggtgtttatggacctgcgcttgacaaaaaaggtaacagcgtcgcaggagttaaagttttagaggagttgtcaaataaactcaaattaaatattttttaaaatattaagaaaggatttttttgacaacaacatataatttaatatataattaaattgtaaagaaatatgaattaaataaattttttaggaggggtcaatgaaagaggtattggtattacgagatttggagtgcataaaggctattgcgcatccacgtagaatagatattctaaaagcatttgacaaatcgccattgtcagcaaaacaattatctcaattattggaagaacctcatgcaaaaataaactaccatataaaaatgttatacaaagttggtattttagaattagttgaggaaaaaataaagtcggggattgtggaaaagtactattatccaagtgcaaaaaatgtggttatagggaataggatacttaatttttctttagacaatggggaagaaaaagaagaattgtacatatcaaaatttgaaaatatgagtgaagttttttataaggcagcagaggaagatgttttagaaaatgaaaatatagttgattatcatgatatttctcttactcatgatgaattagttgaacttagtgacactatgaagtcaaagatagatgaaattttaaataaaagacaacacaatgttgaaggttctaagtatgatatagctatggttatagttcctactcttgaggaggaatgtcctagttagagaattaattatggattaattaaagatataatattagagattgaacatcaaaatttacttaataatcaaaaaatagtttttggtatgggtaaaacaatgatttttaatctctatttttttgttttcttatacctattgtatttgtaaataatatgtatagtgtaagatgtatacactatctgagaagtgcttagataatatacaaagtatgtaagattataatatttgaaattgattaaaatgggtataattaaagtgtaaatattaaaattaaaaattaatataaattaaatcaatgctagaaatatgttaaaagaggaatgagattagttgggatagaacatcccttagagcttatgaatttttagtgaaaaagtactatcaaataggaatctccatcttcatatgttggctaaatatagttaaggtggagtagttcaaaattaaaattgagtacaagtcgtagtacaaataaaaggagattaatatgattaaattaggaacacatctttcaatagcaaaaggatttgctaatgcggctgagacagctgtatatattggtgcaaatacatttcaattttttagtagaaatccaagaggaggaaatgctaaagaatttgatgaaaaagatataattaaatttcaagaaattagaaaagaaaataattttgcaccactgcttgcacatgcaccatatactatgaatctgggtggtacaaaggatgatgtatacgaatttgcaacaagggtgatagatgaggatataagaaggatggactcattaggaattgaatacatgtgttttcatcctggaagtcatataggtggtggtgtagattttggtatagatagaatagtaaaaggattgaacaatgccataaagggtgatgaaaatataactatacttcttgaaactatgtcgggaaagggaactgaaataggttttaaatttgagcaattaaaaagtataatagacaaaattgagcataaagaaaaaataggtgtgtgtcttgatacatgtcatattttttcagccggttatgatatagtgaatgatttagatggggttttggaagaatttgataaggttataggcatagaaagattgaaaactgtccatctaaatgatagtatgatgccatttggagacaaaaaagacagacatgctcctataggggaaggaaagataggattaaaagcattaattgattttatggaacatcctagtctaaaacatttaccatttttcttagaaactccttttgatgatgaaggtcacaagagagagcttaaaatgataaaagaaatactatctagtaaataaacctttattaaaaatatgtgaaatactccgccctcaacataattaaggtggagatacaatcatgaaatgtgataatttaaattaatggataggaataacaaaaattgtatacaaattaactgggtataaagtatgattatattatgaatagtatgtaaatatattgcaaagattctcataatttgttgtataattaaaggtaacatatttatattatataaaaaattattaaaagttaggtggggaaagatatgagaaatttaggcaatactaacatgaaaataaagagagttggctttgggggcattccaatacaaagaattactcaagatgatactaacttagttataaatgagttagaaaaacaaggaataaactttattgacagtgcaagagggtatacaataagtgaggaagcaatcggaattgccattgaaggaaaaagaaataaatttttcttagctactaaaagtatgtccagagattatgattcaatgaagagagatgttgaaataagtttaaataattttaaaactgattttatagatttatatcaattccataatgttaaagaagaggagtatgataatctttttaaagataaaatggcttatagtgcccttttagaggcaaaggagcaaggtaagataaaacatattggtataactagtcacaatttaaatactatagaaaaagctatagaagatggaaaatttgacactatacaattcccttacaatatagttgaaggacaagcagatgaagtgtttaaaaaagctcatgaaaaaggaattgggataatagtaatgaaacctttagctggaggtgctttagacaatgcaacactggctattaaatatatactatctaaagattacatagatgtagttataccaggtatggagagtgttgaacaggttagacaaaatgtcgctgtacttgaaaatcttgttctagatgaaaaagataataaggaaattgaagaaataagaaattctttaggtaaaaaattctgtagaagatgtgaatattgtatgccttgtgctgtaggaataaatataccattgagttttttatgtgaaggttattatactagatatggattaaaagagtgggctaaagaaaaatatgaggttatggatgttaaacctactgagtgtattgactgtgggctttgcgagagtagatgtccatatgaacttcctataagagaaatgcttaagactgttgttgaaaagctaggatagattttatttattgaaatcggtgtattaaatttactccgatttctttttattagatgtggtcttatatacaaatattaaatttacatagttatagctattatataaatttaatatttgtttaatacttattaaatatttgcttaatgctttttaaaaacatttgtttgagtatagacataacacaattattattgttgtattagtatagtttcaaatactggagtatcaatataatgtcgaataacacataaaatctttatttttcaaaaatattataggatatatcgtatttagatactggataaagttcaatttcaaccctagggttatctttatctataaaatcaaataaaaatactggcttaagttgtttatcattttttattattccacttttttcaataccatcacaaatactttttggataattatgtaaatcccccattctcttatttggaaagaataatttcaagactgttattagattttcttcaacagtttccccttgatactgttggtttataaaacctgcaatcatgttttcgtatgcaagatacttagaatattttccctttgaaggcatccatgcttgaccatttatgttatgaagcttaaaattagatttactaataggtctacctggaattgttattttaatcaaatttttcaccatccttatacagtatttattataatctgtatatgatttaaaagcaaattgttatttaaagtgtttttacagggcttgtttgtaaaattttccactttagatgtagtaatataagataagtattttgcttacaaattttaaaatttgatatatgatggacatattcatattagactattataagaccttcataatattaataagtataggtttagtaaagagagtaaaaagaaatccatataagccaagtaaagacttaataaatggcaatgtaaatgggatattaattataagaaaaaatcaatctttttgcattaactataggaagaatgtcaaaatataactaatgatatttgaagttttagagtttatattaaaaggtaagaaggttaagtgggtaaaaaaggttgaatagattaaaaaggctaagtatctaaaagagttaagtaggtaaaaaagttaaataagtaaatgaaaaaagctaagtatctaaatgagttagtagataaaaaaattaaatagataaaaagattaagtatctaaaagcgttagtagataaaaaaattaaatagataaaaagattaagtatctaaaagcgttagtagataaaaaaattaaataaataaaaaagactaagtattcaaaagagttagtaggtaaaataattaaatagataaaaagactaagtatttaaaggagttaagcagataaaaaagttaaataagtaaatgaaaaagacgaagtatctaaaagagttagtaaataaaaaagttaaataagtaaataaaaaagatgaagtatctaaaagagttagtaggtaaaaaactaaataggtaaaaagacgaagtatctaaaagagttagtaggtaaaaaagttaaataaataaaaaagacgaagtatttaaaagagttagtagctagaaaaggttaaaaagactaaaaaaattaaataaatttaaaaagtcaattagattaaaaaggaataattttatggataataaggaattaaaagcattttgtaatttaataggattaaactgtgtaggagtagcaggggtagataagtatgataatttagaaaagatacttaaggacagacaacaaaaaggttatttaactggtatggaagaaccaataattgagaacagaattaacccaagacatataatgaaggatgctaactctataatagtctgtgcatttccatatcatataaatagacaagaaaagaataaaaattcaaatttatcaaaatattgtcatggaaaggattatcacattgtagtaaaggactttttacaacaaatttgtgattatatttctaaaacagtaacagattttaaatacaagttatttgttgataatggaccattagttgacaggtatttagcttatttatcaggaataggatattttggaataaataataatatcataactgatgaatatggttcttacgtatttatagggtatatagtaaataattataaatttgaagaagataaaccactagaaaaaagttgttttaaatgtggtaagtgtgtaaaatattgtccgggaaatgctatattgggaaattatgatatgaaccccaaaaaatgtttatcatatataactcaaaaaaaaggagatttgtcagagaaagaaaaagttgttttaaagaatggcaaaaaggtatttggatgcgatatttgtcaagaagtatgtccacataatgttgaaatgccaacaactcatattttggaatttaaagaaaatataatagattatttggattatgatgagatacaaaatatttcaaataaagaatttaaaaggagatatggagatagagcttttagctggagagggagaaatataataaagagaaatatggaaataattttagataagtatgatgactaataataagagtctgtttcatatactttaatgtgtatttactttaacacttgttgtgtaaaagtcatattatatcattaaagttaaatatggggaggtgggggaatattgaaatataataatacatctgaaataaatccactagattatatattgggtcaagaaagagctgtagaagctatggaattagggttgaaaataaataatccagcgtacaacatatatatagctggtgaacctggaactggtaaaagtacttatgccttaaaggttttaaatgaatatgcatccaaaaaaaatacacataaagattggtgttatatatataattttgaaaaccctagagagcctattatagttgaattagaaaaggggtttggaagagaacttaagaaagatatggagaaattaattgaaagtcttttagaagattttaaaaatgcgtttgaaagtgaaaattttgaaatagaaaaaaatagacttctagatgaatatgaaatagaaaaagatatgcttttgaagcaaattaagaaatatggggaagaaaaaggatttaaattaaaacagagtaaaatgggaatagtttttatccctttgaaagaagaggaagatgaaagtgataagtctgatgaagagttttacaaagctaaaagagaactagaaaatatggcgatacaggtcgtatataaaattagaaacttagaagaaatagctgaaaaagcagtgttagagcttgaagaagagatagctaaacttgtagtagaacctcatatcaagagattgtgtgaaaaatatgaaaattatgataagattcaaacttatctggaaaatataaagaaagatataatagaatatatgtatttgttctatttagatgaagaggagttaaaagataagtatgataaagagcattttattaaatacaaaattaacctatttgtagacaatgaaagctcaaagaataaagaatcagcacctgttgtagtagagataaacccaagtccagcaaatctatttggaaaggcagagtatgattatgcaaatggaaatataaagactgatttcacaaaactattatcaggagcatttcatagggctaatggtggttatttagtactttatgcagaccaattactaaaatatacaatgtcttgggaaattcttaaaaagactttgcagactaaaaaagtaatattggaaacacaaacagcaattaaaccagaaaatatgccattggatgttaaattagtactgattggaagccactatatatatgatattttatatagatatgatgaagattttgaaaaatattttaaagtatttgtagactttgatagtgaaatggataaaaatgaagataatgaagaaggaatagcaagatttatagcataccaatgtgataagaataatttaaggcattttactaaatcagcagttgaagaggttattaaatttagcactagattatctggtgatttagaaaaactatcaactaagtttaataaaataatggaagttgtaatagaaggaagtgcttatgcagagtttagaaattcggagtatacagagcagtgtgatgttaaaaaagcaataagtgaaaagagaaaaagaatcaatagagtggaaacacatatggatgaatcaattgaaaatggatttactctaatagaaacagagggaagaaaagtaggagtgataaatggtctgtcagtcttaagtacaggagaatactcttttggtagagcttcaaggattacagcgaccactagcccaggaagtaaaggcatagtaaatatagaaagagaagtaaatatgagtggctctatacataacaaaggagtgcttatattaggtggctatctttctgagaattttgcacaggatttactattgtcactaaacgcatatgtttgttttgaacaaaattatggtggaatagatggagatagtgcatcttctgcagaattatatgtactattatcatctcttagtggagtatcaattaaacaaaatattgctgttacaggttctataaatcaaaagggtgatatacaagtagttggtggtataagtgaaaagatagaaggattttattctatatgtaaaactaaagggttaaatggtgagcaaggcgtcataattcctagaaaaaatcaaagaaatctcgttttatcagatgaagttaatgatgcagtgcgagatggaaaatttaagatatatactgttgaaagagtagaagaggctatagagatattgacagatgttaaatttgaagaaataaagaaattggtaaaagaaaaattaatatctttcagcaagatacaaactgtgtcaaaagaataagtttattatagaatttaatgggtatttatgtataataaaaagcaagaactttaataggtttttgctttttttgtaaatatatataaattaaattcttattttgtatgttttatatattgatgtttattttttgttgatatgactaaactatttataaatagtgttttataaattggtattttaaagggggataattatgaaaaatgtaaatctaaaagagataaatgaaaaagatgtaattgtggaagaagatataaatctaaaaggaatggataagaaagatgtaattgagaaggaagaagtaaataaaaaaagtatagataagaaagatataattgagaaagaagagatagataaaaaaaatgtaaagaaggttgaggttcaaaaagaaatagataaaatgattagtaaaaaagatgagataattgatgagaaagatatagagaattttaggtatattgaagaagataaaaaaagtatcaaagtaagtaaaaaaagtactaaaaaaggtgaaacggagaaaaaaacaaagaaaagtagttctaataaggctacacaaaaacaaagcaaagaagttaaaagtaagtctaaaattaaaagtgaatcagccaataaaaaagatgtaaataagattttagatgagttggaaaaattgtacccagatgctaaatgtgagttaaattatgggacagcctttgaacttttaatagcaactattttatcagcacaatgtactgatgtaagagtgaataaagttacttcagagttgtttaaaaagtacaacacagctagagactttgctaatttgagcattgaagaaattagtaaagagataaagagttgtggtctttacaaaagcaagtctcaaaaaataaaggatacatctgaacagctatgtgaattatatgatggtgaagtacctgatagcttagaaaagcttataaaattacctggtgttggaagaaaaacggcaggggttgtacttagtaacgcttttaatcatccagcaatagctgtagatactcatgtatttagagttagcaatagaataggaatagtggacgagccaaatcctcaaaaaacagaatttgcacttatggaagctataccaaaagaaagatggtcacactcacatcatgtattaatttttcatggaagaagaatgtgtaaagctagaaatccagaatgtgcaagttgcccaataaaagaagattgtaattattataaagaacttaatgaaacgaaataacttttagaaagtaagttgtacaagagggattttctgatataataatacttgtgaaaatgttagataaaaaactattatatacatgaaataaaaattattattaacattattttatataatagtataatattattgttattctgtttataaaataaaatttgataaataaaagcgatacttagggaggattaaaatgtcattaaatatagtattagtagaaccagaaatacctcaaaatacaggaaatataataagaacctgtgcagcaacaggttcaactttacatttagtaaaaccactgggtttttcattggatgataaacacctaaaaagatgtgggcttgactattgggatatagctgatatacaatattacgatagctttgaagaattacaagaaaagtatccaaatagtaaatactttttttctacaacaaaggctaaacagtcacattcagatgtgaaatatgaagaaaattgttttatagtatttgggaaagaaacaaagggattaccagaacctttgttgaaagcaaatatggatacttgtattagagtgcctatgttggatgttgaaaaggctaggtcattaaatttatcaaattcagttgctattgtagtgtacgaggctttaagacaaataggatacccaaatatgaggtagtttcaacaagcctaaatgagaaaggagcatacttaatgaaaaatctaaagataatctgtgacagtttatcggacgtgccaaaagatttgttagataaatatgatatagatatagtttcattaacagttatactggaggaaagagaatacaaggatagaattgatatatctggagatgaattttataaaaggcttagagaagaaaatgtatatccaaaaacttctcaagctacttatgcccaatttaaggaaatttttgagaaatatacaaatgaggatagagagatactttatatagcagggtctgccacagctacagggacgtatcaaagtgctgtaatggcaaagaatgatgtggatggtaaaatatatacatatgactctaacttgctttgtatgggaactggtttacttgtaataaaagcaggagaacttgcaagtgaaggaaagtctgttgatgaaatattacctgttttggatgaattaaaagagaaggcttttgttatattttcagtagatacattggaatatttacaaaagggaggtagaatatcatctactaaggcagcaataggaagtatattaaatataaaaccgattcttgaaataagagatggactagtttcgcaaatatctcaagtaagaggaaagaagaatgtaatttctaagatgatggaattgataaaatcaaattgtggggatgatttatcagaccaaattgtgtatataggatatagtgatgattttaaggaaaaagaacaattatctaaggttatgcaagatgaattaagacctaaagaaattagatttttccaaattggtgtgtgtataggtgcgcatgctggtcctggtgtcactggtatcatatgcttaaaaaataaataatatatttttggatgacattatttatttttttattaaattaggatagaatattaattattgagatgttaaattggatttattttggatgaaattaagtgttgatatattagatttagtttgtagggaagtgtgtaaatagataagaatctattgcacacttttttatagtaagatttattaaaaaaatttcaaaatgtacttgtaaattgtatataaaaaaattataaataggatgtaaaagtaaataggatgtaaaagtaaataggatgtaaaagtaaataggatgtaaaagtaaataggatgtaaaagtaaataggatgtaaaagtaaataggatgtaaaagtaaataggatgtaaaaatatcgtaaatgtatgaggagtgaaatttaatgcgtttcaaaagaatattgatattgatgttaactgtagcaatgatagctggaatgttggttgggtgtgctaataacccaagcaataatcctagctctagcaaagataataaaagtgatataagcgataaaagtaattcaaaaaaatctgtatcaatgatactagatattgaaggaacaaataatgaagctatgaataatgcagctttattagcattaaacaatgctcaaaagaaacttaatatagatacaaacaaagtggaatcagatgattcctcaactttttctaatagtatagatattttatgtaatgacaattacgatttaattatagctgtaggagctagatttgcaaaaccattggagatggtagccaagaaatatccaaagcaacaatttgcaattatagactatgagtatgacaagcaaccttctaatataacttcaatttcttatgaagataataaatctggatacctagctggattaattgctggaaaaatgactgaaagcgataaggttggttttataggaggaataaagagttctagtagggataaatttgaatcaggttttagagagggtgttaaattttctaatagtagtataaaggatatttcagttgagtatgcagatgtttttaaagatagcaaatcagtagaatctatagctaaaaaaatgatggataatggagtggatattattttttctactactgaagatgattcaaaagctgtaatagatgcagtaagggcaaaaaataaaaaagttatagcaacgaataaagaccaacatgagttagctccagaaaatgttataagttctattgtaaaagattttgagaatcctacttataatctgatacaaagttttgtaaaaggaaattataaaggcggaaaagttatagaaaacacagttaagtctggaagtactgggcttgcccaaaatagttctcaaaatattcctccagatgtgttagaatatgttaataagaacaataaataatctactataatatccaagaatacttatgactttagttatgaggtgaattggatgttataatagacatatatagaaagacgtatgcagaggtaggcagacctatctaaatcagggagtgaattttgtgaaaataaaaaggatattgatggcttgctttgtagtagtttttacaatttttatattagctatatgtaactttgattttggatttgataaagtaaataagaataattctaatatagatagtgctaaatcgaaacagagtgagtctaaaagtgtaccaacttcagcagaaaaggataaattaaatagtaaaagtaagaatgaagaagatgacacagaagatgattcatatgtaagaaaaactattggagtattgttagataccgaaaacttaaataacgaatcatataataataatgtactatcagccttaaaaagggctgatgaagattttgatgttaggataaaacttgaaaaaccaaagacttctaaaagttttaaagagagtatagaaaaactacataagtatgaaccagatttgataatagcagttggagctagatttgcagagccaattaaagaagctgctactaaatatcccaaacagcaatttgcaatagttgactatacttataaagttcagccagctaatgtaatttctgtatcatttcaagataatgttactggatatttagcagggcttattgcaggtaaaatgactgatactgggaaagtcggttttataggcggagttgagggttctagtagagataagtatgaatctggatttagaaaggggcttaaaacttcaaataaagatgctgagttactagttaagtattcaaatatatttgaaaaccctgaatcagctagaactattgcaaaggaaatgagagattctgatagagatgttgtattttcagctacagaagatgatagtaaaagagctattcaggtagcaagagaaaatggtggtaaagttatagctattaataaagaccaatacgatatggctccagataatgtaataagttcaattataaaagatgtagaacaacctgtctatgaactgataaagaacgttgcaaaagatggttttaagggaagtaaagtaatggaatttaaaataaaagatggagaacttggcttgacttcaaagagcagtagaaatataccaccagatgttttggaatacataaaaaaagagtataacaaagtgaaagatacatattaattattgatgtagaagattataaaaatatactgtttaagtttagattagcaataaaaagatatatttattaaatttgtgctaactgtacaaaatatattgattaagtttagattggtgataaaaagatatatttattaaatttagtctaactgtacaaaatatattgattgagtttagattagcaataaaaagatatatttattaaatttgtgctaactgtacggaatatactgcttaagtttagattagtgataaaaagatatatttattaaatttgaaccaactgtacaaagctatactaattaagcttagattaactatataaaattataacaataagtgtgtgggcagaaaaattctgctacacactttatttatattcatataaaaaaattatcaaaaaaaagaaaaaggagtaaaaaatggaatttacaagagaaccatttatactagatgacgatttgtgtctagctttggtggacaaaagaattagttatctaatggaaaatgaattaaaattaagaaatatagagataataaaaacaatagaatgtaaagaattatatgaaagcataaaatatcacccggatatatgtatttgtaatttaggaaaaggagatataattgttgcgccgaatgtatataatcaatacaaagagttattaagtagatataaatttaatataattaagggagaagctaatttattaaatagatacccttatgatataccttacaatattgcgatagttggtgactatgctatacacaattttaagtatactgacaaagcaatattagattatattgaaaataataaacttaaaaagataaatatagagcagggctattctaaatgctcaatctgtatagtagatagaacgtctataataacatcagataaaggtatttggaaaagtatgaagaatacagaaatagagtgtttattgatagaaaaaggtcacataaatttatttgagatgaattatggatttataggtggatgtacagggttgatttctaaggataaactagctttttgtggagatgttaaaaaacatcctgactatgaacgtataaaaagttttgtagaaagtaaaaacaaggagatagttacacttagctgtgaaaatttactagatataggttctatagttcctctcatgacaagaaaggagcgataactttggttgagaaggataatatttcttccatgaaatttttgaggaataataatgtaaacgatagattaatatatacgaatgacattgtagaagtagtgatagattctgcaaagcaagaagtgttaaataaaaaaatacttaatggtactaaagctgaacaaagagctttaaatattgatgagatatcaacggaaataactagtatgataataagtataatgaaagagaaacttttgaaagaatacattctaaaatgctatgggcgtacatatcctgaagataaaaataatatatacatatattcactgaacatatttgctaaaaaagagatttttatgagagaaacagtatttactagggtgagaaattatatagaagaaaatgattttataaatgtagaaggttttattagatttagaatgagagaatttatgaaatatatttctgctataggtgatattgcagttgaggagtatttaataaagaaagaccaagatgaatttataagagttttaaaatactttatagatactcaagaagaaaagattgatttgcttaaagttcatataatggaagataatacatttgttttatacgataaaaatggaaataagatagacagtatagatgatgaagaaattataaatatggtaataagagaaaatttaaattatgaggactttttaataagtaccttattaactctatgtcccaaaaaaatagaaatattggatttgttaaataataattgctcaaaggaaattatagatactgtagaagcaatttttgaaaataaagttagtataattatggaaaactagaatctaagcatataaaagctagccatataaaattaaaaaaattctttttaaatcgacacaaaagacttataattgtatataaagctatagtataactagagttattaagtataaagaatatctacttgattaatgcaatatagctggcaaatatacaattgataaggagtaattttataatggataatttaattaggatactgatattagctgttattggtggatttataggttatgttacgaatgtagttgctataagactgatatttagaccaatagagcctattaaaatacctattttaaatatagaaatagtaggtcttataccaaagagaagagcagaaatagcagcaaatgtaggagaaataattcaagaagaatttctttctatggacgaaatacttgcaaatatcattactgacgaagataaggaagaagttgtaagatacataaaagcaagggtaaaaattataatacatgagaaagtttcatttatcccgagtggtataaaaaacatgatacaagattatctaggagagataattgagtctgaagttaagcaaagtatagatgaattgagtaaaaatataataaataaagcaaatgaacgtatagatatacaaaaaatggtcgaagataagattaatgaactagatttatatgaattggaagagataataataagaatagctaagaaagaattaaaacatatagagtttttggggcttgtcttagggtttttaataggtatagctcaagggttaattactatgtttatttaaatatatgagaagtagcatttatttaagtactaattatatttacctatttgagtgaattacttattaatagtatttagatattaattgtatttacctatttgagtgaattacttattaatagtatttagatattaattgtatttacctatttgagtgaattacttattaatagcatttagatattaattgtatttatttatttgattgtgttacttattaatagtatttaagtatttactgtactacttattaactatattaagtattgattgtatttaagtatacaaaacctaaaaagagtacaaaaattagaagttagttttaataaaaattagttttagtatttatctagtcatatctatcatgcatgtggatacgttttaaaaattttaaatttatgaaaatattataatatcactataaatcaagagattaatttaatataaaaatataagaatattggtttacagctgattgagatgaaaaataatgggtaattaatatattacattaatgttgattgatgtataactatctgttataatgaaaatatattaaaaatcatagtgttgaagaggaagagtagagtagaaaccattctcagagaatttgggtctatggctgagagcccatgtaataggtctatttgaaaactaccttggagctgagcttattagcagtatttgtatttgtactatacgtgaaagtgctcgggtgacgaccttatagtcatcaagagggttgtatatacttgtatacgccaacttgggtggaaccgcgaattaatatcgtcccaaacatatttggggcgattttttattacaaaaaatctaaaaattatttcaataaggaggaaaaaacaatgattaaagttgctttaaaagatggctcaataaaagaatttgaaaatgctatttctgttatggatgtagctaaatccattagtgaaggattagctagaaatgtggtagcagcgtctgtgaacggagaggttgtaggtctggaccacattatagatactgattgtgacttgaatttatttaagtttgaagataaagaaggtaaggaagtttttagacatacatcagcacatatattagctcaagctataaaaagactttacccagaagcaaagcttgctataggaccaagtatagaaaatggattctactatgatatagatttagaccatagattagttccagaggacctagagaaaatagaagctgaaatgaaaaaaatagctaaagaagatttaaaaatagaaagatttgaacttcctagaaatgaagctttagagcttatgaaagaacaaggagaagactataaggtagaacttatatctgatttacctgaaagtgaaataatatctttctacaagcaaggtgattttactgatttatgtagaggaccacatttaccatctactaaaaaggtaaaagctgttaaattacaaagtgtagcaggtgcatattggcgtggtgacgaaaataataagatgcttcaaagaatatatggaacttcttttgagaaaaacaaagacttagaagagtacttacatttactagaagaagctaaaaagagagaccacagaaaattaggtaaagaattaggattatttatgatacctgaagaaggtccaggattccctatgtttttaccaaaaggtatggaacttaaaaatgaattattaaaattctggagagaaatacacagaaaagctggatatattgagatagaatctccaatcatattaaatagaaaattatgggagacttcaggacactggtatcattacaaagaaaatatgtatacagttaaaatagatgatgaggattatgctataaaacctatgaactgtcctggtggattaatttactataactctcaactacattcatatagagatttcccaatgagagttgcagagcttggtagagttcatagacatgagttatctggtgcattacaaggattaatgagagttagagcatttactcaagacgattcacatatattcatgttaccagagcaaattaaggacgaaataaaaggagtagctaacttaatagatggtatctacaaaacttttggatttgaatataatttagaattatctacaagaccagagaactctatgggaagcgacgaagagtgggaagcagcagaaaatggattaagagaagctttagaagagttaggtctaccatatactattaatgagggtgatggagcattctatggtcctaagatagacttccatctaaaagattgtttaggaagaacttggcaatgtggtactatccaattagatatgcaacttccaagacaatttgataatacttatattggtcaagatggtgaaaagcatagaccagttatgattcatagggttgcttttggtagtatagaaagatttataggtatattaatagagcattatgctggtaaattcccagtttggttatctccaactcaagttaagatacttcctatatctgataaatttatggattatgcaaatgaagttaagaaagagttatttgataagggtataagagttgaattagatgatagagctgaaaaaattggatttaagataagagaagctcagcttgaaaaagtgccatacatgttaatagtaggtgaaaaagaagtagctgataataatgtttctgttagatcaagagataaaggtgaaataggtagtattaaattagatgaatttatagctagtatttcaaaagaaattgaatcaagagaaagtattattcaagactaatatataatatattagtagctaagatattgttatataagataagtttaatcaatatgttgatatgttgatacatagtgattaaatttatgaaaagatgagtataattagaggtacagttaatcatatttttatgattaatgtacctctagttttttgtatggtagatttattaataaatatatcatagaagtgttttgaacatggaaatatttatgtgcattctttaaataaaagtttattttttgaatgataattaagtgcttgttggtaaggttatggctgtaaaaatcataactttatttttatatttgttccattttcataaaaattattatccctttaagaaaatttcttaatcctcttgaaatatttcctttttagtctaaagttaaatttctttcttcaaaatgaatatttaaatgaactaaaatttaagtacattttctaatcttatgagtctatttttcatagataattgccctataatagaagaatctatgttggggctatgtggtgacaataacagcattgtcagtgattaattaatgctttataaatgattaattagtgttttatgttatttttggacttaccctctatacatagattaatttatttaactttagatatagagagaatgtcaagtacatacacagacattagagtttaagaaagtgtttatggagcaagaacttttaaaagaagtagtgacttagtttaatttcaagaaatgataaatacaaaagaggaaaaagagaggtgttgaaatgatagaaaaagtagaagaaaaatctaagattattaaaacatcaaaagaatataagcgaactataattgaagaaaaagataaagaatggaccaaaaaattaaatgatatacttagtagaagtagtttttgtaatgatgaattagataaaatcaaggcgttaattccaaaagagattttgactaatgaaaatgttggagaagttgtgactgaagatggatatgctaagcccgagtatgatgaggtatttaaatcattgttcactttaaataatgaatatgatttacttgtaaattttataaatgatattctaaaagatgctccatatgctaacaggaatatcaaaccgttcactcaaataaagagaataattagagttgaaactgatccaacaattaattacattggagagaaaagacctagacttgattaaaaaatagctacgcacacttgtgactttagtcatgagttagtagctaaaatagtcagcatatagggaaacttatatgtagagataggatagaacctatccaatactacttgaattgctaaaaacccctaaagctaaccaaactaaaacataaggatgaaataaacctaagtgtgaaagttacgaaagtagaaaaaattggttagatggtataaggttaaaccctaagtactttaaaatgggcaatcagcaggtaagctccgaataggagaagcttcaacgactattcctcttgagggaagtacactacaagttattggtagtggaagtgggtagaccttagcggataatgccgaaggataagatatagtctgtgcttgaatgaaagtgtaagaagttcataagagaactgcataggtagtagcgaacttatgtgaacgacaacctcaaaaatgataaaagttaagacttacggttcttatatatgttatttaaaaataaatataaaaaaccttcaaaatacttgttttaagtaattgcatattttaatattatgataggtgatgaaaaatggaagttactcatggtagaggatatgcatatagtatgtcaaatacagacatccgtattatggggagacatctttggaatcctagttatttcgttgctactgtatcagaaaatacagaggagcagataagaaaatatattaataatcagaaaaaacaagtaaagtgaggtggtagtagtggaaaaagcttataagtttagaatgtatccaaataaaaaacagcaagagttaattaacaaaacttttggatgttgtagatttgtatataataagtatcttgctaaaagaatagaagtttataaaaatgctaaagaaacttttacttataaacagtgtagttctgatttaaccaatttaaaaaaagaattaaaatggcttaaggaacctgacaaattttcactacaaaacgccttaagagatttagataatgcatataaaaaattctttaaagaaaaagcaggatttcctaaatttaaatcaaagaaaattaatagattttcatataaaactaactttacaaatggaaacattatgtattgtggtcaacatataaaactacctaaacttggtatggttaagataagggataaacaagtacctaaagggagaatacttaatgctactatatctaaagaaccaagtggtagatattatgtatcattatgctgtactgatgtagatattgaagcatttgaaaatactaataatcatataggtttagatttaggaattaaagaattttgtatctcaagttgtggagactttatagaaaatcctaagtatcttaagaagtcattaaacaaacttgctaaattacaaagagaattatcgagaaaaacaatcggtagtttaaacagaaataaagcaagattaaaagttgcaagacttcaagaacatatagccaatcaaagaaatgattttctacaaaaactatctactaaattaataaaagagaacgatattatttgcatagaagatttacaagtaaagaatatgattagaaatcgtaaactatctcgtttaatttcagatgtatcatggtcagagtttattcgtcaattagaatacaaggctaattggtatggtagacaaattgtaaaggtaggtaaattctttgcaagttcacaaatatgcaataaatgtgggtataaaaacgaggaagtgaagaacttaaatataagagaatggatttgtcctagttgtaatgaaactcacgatagagatataaatgcaagtataaatatattaaaagaaggattaagactaataacaattcaaaataaataacttatgtaagaaccgtaggaactacggggatagcctgtggagaattagtaagacatatgttagtatgcaaaattctatgaagcaggaaccctgtgactttagtcatgggaggttcagattttggctgaagatgaagaaaataatcatataaatattgagatgcaaagagcttttgagaacgattatttggaaagagctgaatattatcttagtcgtgtacatggtagaaagttagaagaaggtaaagagtataaagaaattggaaaaactattggaatacatatactaaatcatgtaaaatataatcacatagaagattatgtaaattgcctgagattaacaatggacgagcatccagatatttattctagtaaaactgcattatattttatagagcttccaaaaattcataaatctgactatatagtaaatagaattatgctatggggaaaacttattgataatccttctagctcagatgtaagagttatagctaagaatgattctattattaaaaaagcacttgatagattaaaagaattaggtagcaatgaagaatatttattaaatctgaaaagaggtgcttatatcatgaataaaagtagaaattttaaagaagagattgaaagagagacagcaattagagttgcaaaagaaaaagattataaaataattataatgttgaaaaaaatggttttaaattagatgacatattgaataaatttaatgattttgacttaagtgaagatgagataaaagaagtatatgaaaataattgatgataaataaaaagtgaacttatataagtttgctgaatctgagcctggaaatatttatgtgtattttttaatgaataaaaatttattttaaaaacaataattagaggtacagttaattatatttttatgatactgtacttctagttttttctattgtagatttattatttactaataaatctacaatagaagtgcttttgttgtaagaatcattttatctaatgattgttttttataatagttaaatttccatttgtagtgcttaaatataaatttgtaataccatttttataagtgtataaatcactatgacgattcaactcaaagtcactgtccaaaacaccagaaaccttatcaaaatttaaagtgaaacctggattatcaggaatagacaaatcgacattggcagaagtagtttcacagtacagagaagacaacattttgctagaattgatttttatattactgctagttgactcagctttaatgtcagaaaaaactccagataagttcatttttccagaaactgaactacaagtaagatttttattgtatatatcttttaaatttatattgccattagttgtttctaagtttaaaacatcaattttcccagaaagctgtatttcaccagatgttgatttgagtgtagcatttttactatttagttttgttatatcaatgtgaccactagttgtgtctaaatttattttattaatattaccagagagacctattgcacctgaaattgtgttagcttcaactgtattacttcttatgtaagtgctatatatatctgctgaagtagtatataaggttattttatcataaagcttattgggcaaatatagttcaagtattgttggttttggaagattaattccaatgaagaattttttagttgaattatcatatatagaaagagaatttccgtcaaccattatttttgctagttttttctttgagaaattactagggattttttgaattaatttgattttattagaatcacttctcttaattctaacttcacctgaaatccaatcaacattaatgtcatttattttatctgaaaaactttcatttttagccactatatagttatcataattgtatttaggattaagagtattaaaagggaaattaaaagaatgtgaaattatagttcctataaggagtgagataaatacaatagaaagtgatattgccaggatactccagatgaaaatctttgcctttataagctttttattcatatttatcctcctccttgtagccttttagttgtataattcctttgacaatgttgacaccagcagcacctattataaatagtatccacgaaaaggaccaaatattaaatagtatgcttgtgattagatatatagaaactactataatccaatatgcattcataaatgatttataaactggatttatatgattataattttcctcaaaatcctcaaattctttgaatttatttgataaattatcattgtatagagcatagtttgtccttgtcatttgattatagactaataaacctactccaagtgctattaatatgagcattaaaagaatagctatagttggttctatgccaaaacttacaactgagactacaaataggaaagggcttattataaaaagagcaactgctattgatgctcttaaggctcttttctttttttcttcaattaattcagaaggtagagaatatggttccttaacactttcaattaactcagataaatcaccaattcctgagattactgagttatatgcttcttgttctgttttaccatcttgtatttggtcgttatacttttcttttagattttcaaataattcatctttaagttctttgactttttttgtctcattaactcctgtaaagctactgtcaatataagtacgtattttgtctaacatattttcacctcctaaattaatatatctatcaatgcttttgtattattccattcttcacggctttttatatatttctctttacctatgtttgttattgaataatactttcttctagctccagtaacttcatcaccccaataagaggttattgcaccagattgttcaagtctacgaaatgctgtatacaaagtagcttctttcaactcatacaatcctttggttttttcaagtatagatttattaatctcataaccataactgtctttttcaagtaaatgttttaagataattgtttctgtatgacctcttatcatgtcagatgcgattatcatgaaaatcacctccaattaaatatataatactttgatatacttcgcctgtcaaggtatatcatgagaaaagacattttattgtaatatttataaggttttatatagaaataatgtaaaaactttataaataatatattttatacctagttatagataactttatatagttattattaaaaaaagcaataaaaagtttaattcaatttagcaaatttagtgatataattaaaaaagaaaagaaatatggacttatttggaataattttgacaatctatttactacacgtgtagagtcgtatataattaaattatacataaaatataaaaaaataatttagtaatacgttaggagaaagtattatgataaagtcaagcttattttggaatattttcattgcgatatcctttatgatagaatggtttctttgtaagaaaatgctagattatacaagtgagaaaaggatttctaacaaaaaaataaacttttgtatggtaggtattattgtttttgctgacataatatatttttttgatgtacctccaaatataagagtaattatatctatgataattactattgcattttataaaatctcatatgatgtgggatttataaagtctgtattaatatccttaatttattggatgttactaatcgccacagatgctttgagtatatctttaacagtttggcttaattctataaatgacatgagtagtatggggacgggagatatatacagaattgagtctataatattgggaaagatacttttgattgtgtctttgtttttatatagagccttaaagataaaacttaatatagaaataaataaaaggacattattttatatagttattcctatagtcgctaatatagcatctttttttgtaatttttgaatacatatttaatccagggtctggtagcttaatacataatttccaattcgttatgatttctgttgtattgcttatatcaagtatcactttagttttaattgctaaaaaattacagcaatataatactttagttgtagaaaacaatatgattaaaaatactttgaagtatgaaaatgagtattatgaagatatagaaaagaaatatttaaaaactagattactaagtcatgatatgaaaaatcacatactgtgtataaatgctatgattaaaaaaggtattgatgttacttcttatttaaataatttgcaggtagaaattcagagtaatgacttgttatttaatactggtaattttatattagatgctatattaagtgaaaagaaagaagtttgtgataagaatgatatagaactaaaaataggaataaattttagttgttgtgaagctgttgaattagtagatatatgtcatatattttcaaatattttagacaatgcaattgaggcatgtaataaaattgatagtggaaatagagttatttgtgttaaaggtgatgttatgcaaaatttttatttaataagagttgaaaatactaagatgaataagattattactaaaaatggagatattttgacagacaaaaaaggttctcttcatggacttggaataaaaagtgtaaaaaactctgtaaataagtatggtggtaatgttgtaattgaatatgatgataaaaaatttgtagttaaaattgctattccacttagaaatgtgaagaaagcagttaatcatgtgatttaaatgtatataaatttgatgtgtagaaatttaatatataagaattaatgtataaaagtgatgtatagaagtttaatatataagaattaatgtataaaagtgatgtatagaagtttaatatataagaattaatgtataaaagtgatgtatagaagtttaatatataagaattaatgtataaaagtgatgcataaaagtttaatatataagaatttaatatgtataaaagtgatgcataaaagtttaatatataggaatttaatatgtataaaagtgacgcataaaagtttaatatataggaatttaatatgtataaaagtgatgcatagaaatttaatatataagaatttaatatgtataaatgtggtgcatagaagtttaatgtaaaaatttggtgtataagaatttaatatatatatttattttaatatataaattgaagatatataattaaatcatataatgccacttgtatattagaattgtttattgagtattagaaacttttaaggttagaaagtttatgactattatacattatattatttatagtatttattatagattatatagtgagtttaaaatattaaactttttattctacaaaatataaaaagaagttgcatcaaaaagagaaatgctctttaaagatgtaacttctatggtatatgtatgaggagctatattgccatctctggaatcaagcttctcatagcttctatagttgtttggataagcttatcaagttcccatccaagcatttctgcaccacttcttataacgtctcgagaacagccagcagcaaatgatttatctttaaatttcttcttaacagattttaattctaaatcagaaacgctctttgaaggacgcattattgcaacagcaccaattaaaccagtaagttcatccacagcaaataatactttctccataaattgctctggtttaacatctgaaccagttaatccatatccatgacttattgtagaatcgattattgatttatctaaatcaagctctgtcattaattctctttgtttaacacaatgttcatcaggatacatttcaaaatctaaatcatgtaaaagtccaactatttcccaaaagtctactctctcagggtcgtactcctttgcatagtatctcataactccagatacaatttgagcatgtcttatatgaaattcttccttattgtattttcttaatatttcccatgcttgttctaaagttggcatgtaactcatttttatcactcctctagctgaatattttgaatttttataaagtttattttccattgattatatcaatcaatttctaaaacgtcaacatactgatacgcaattttgcatttaaattcagaaattagtgaaaattaaatctttatatctaaattctttgtatctaaagattttcgttcctcaatgttatctttgatacaaatgctataagtagtgtaataaatccaactcctagtataatgatgtacactctatctgataataaatcaaaaagtttaccatacataacctgaccaagaggcattgcaattgctgttcctgcaaaaagaattgacattacttttcctaagagttcatttggagtttttaattgtgtgactgttataacatatattgagataagagtcgttgtaaaaaatattagcatagatgatactataaagattaaaaatggaactggaaatcctgtgtttaatataaatggatatactgaaaccgccattggtatgaacataactgcacatataataaaggaaatgtgcaaattagtgatttttagatgttttgagaaaataccaatactaacagcagctaccagtgaactaaaagaaattgctccttctgctagaccatataagaagttactagctcccatagtgatttttactatataggggataccaactattaacatagagcttaaaaataagtttattgctatagctaaaaaaagtatttttagtataaatctattttctttacatatatgaacaataccatcctttatatcagtaaatatagtttttataatgttgctgttttgctcttgtttgataaaaggaatctgtataaatatctccataattgcagatagaaagaaacttacacaacttataactataattgcattaattccaatcacaccatacaagacacctcctaatacaggtcctgcaatatttgtaagagatgcaactccagctacaataccatttgcattcattaaatgctcattatcaactaaaaggggtgtacttgactgaacagttggttgatacattgtgcttataactgataatatggtcataataattcctacaagtaatattgaaccattattgttgaataagaatactgctaagattagtactgtaagactgcttgaaaaatcaaaaataaccattaagtttcttctgttgaatatatccgcaatagctccaccaataggggagaatactataattgggattgaagatactgctagtatagtagcaaatatttctgctttaccagttatatcaagtatgtataaagataaagcaaatttaagtattgatgcaccaaacaatgagattatttgacctaatatcatcaagttgaagtttttattaaaagtgtttgaggattttaccatatatatacctacctatctaagattattaaaatatttataataattgatataatagcaattattataaggaatttttttcttactttaatatctaatattattagaaatatacgaactattatagatggcttagagtagagtggaatgagttaactctggggtctataagttttgtgtgtatatttagtttatcatttattttgtaaatgatattgtttatttttttcattaattcaatcatattaatcctctttagtataaagaaatatttagaaaaattattttaaattgttattcaagtatgtgttctacaagattatctaccataaaatcaaatacttcaatatagttatattcaatattttcttttaccaatagacttgatagtagagaattacaaacaccaaaggctttttctttttctatcttcaacttgagattgtgtctcttaattaagtcgtaaaaactttgtatgttattggactcaagttgtaaaaacatatcttgaggtagtttatttattaggctgatgaaatcaggattatttggtgaatataaaaatggatttttatcatataatcgatataacatttttaaggattttgcaaagccttcttttggaggcatgttacttaaaatttcatctactgatgatataagtctgttttggattccatttagtacttcaaaaaataacttttcttttgaatcaaaaaatgtatagaaagaaccctttgcgattcctgattttgaacaaagttcatcaatgttagtttttttgtatccatatttagaccagttgatttcacattctgaaattagtctttttcttatattgtctttttctatttctgtaaaacttttagccatttttatcaatcctttctatctgcatatgctatctatgactttaaaaatattttaagtcatagatatataatattgtctacttataaatttgtcaagtgatttatgtttataatatttatattggtatattggtatattggtatattgatattaaagtgtgacctatatagatttggagcgagtatgttattaaaatagaagaatctagaaaaacgttaacttaaaattttttttataggtaaacgtttatgaaaaaaagaaatgtttacataacgaataaatggctataatttaaatacacaaagttatatcagagagaggaataaaaatatgtttaatgaacttaaaacaaaagaaaatgtatataaaaatttaataaatggaaaatgggtagaatctaattcgagaaagccaatagaaatttactcaccaatagataattctcttgttgggaaagtacaatctatgacaaaacatgaggtagatgaggttataaaaaacacaaaagagagtataaaagtatgggctgaaatgcctgtatacaagagagccaatatatttcataaggctgctgatttattgttagaaaatatagatgagatagctaatatactggtacttgaaatagccaaagacataaaatctgcaagggcagaagttgagagaacagcagattttttaagatacacagctgatgtgggaaaaaatatggagggtgaagccattagtggagataatttccctggtggaacaagaaataagatgtcttatgtttcaagggttccattaggtactgttttagctatatctccttttaattatcctgtaaatttatcaatgtcaaagattgctccagcgcttattggtggaaatgcagttgtattaaaacctgctacacaaggggctattagcgcacttcatgtggtagaaatcatgagaaaagctgggataccagatggagtacttaatactattacaggtaggggtagtgagataggggattatgttgtaacgcataaaggaattaattttattaactttactggtagtactgaagttggtcagcatatatctaaaatatctggaatggtaccactattattggagcttggtggaaaagatgcggctatagtattagaagatgcagacttagattttgcagctaagaatatagtatctggagcgtattcatattcaggacaaagatgtacggcagtaaagagaattttagtacaagagagtgtggcggataaattagtcggaaaaataaagccattggtagagaagttgacaattggaaatccaatggatgaagtagttatcactcctcttatagataataaagcaactgattttgttcaagggttggttgatgatgcattacataaaggagcaaagttaataacaggtaatgttagaaaaaataatttattctatccaacattgttagataatgtaaatgttgatatgaaaattgcttgggaagaaccatttggtccagtacttccaattataagagttaaagatataaatcaagcaattgaaattgctaatcaatcagagtatgggcttcaatcatcagtatttacaagtgatattgatagggcattttatatagctgataaacttgaagttggtactgttcaaataaataataagactgaaagaggtccagaccacttcccatttttaggtgtaaaggcatctggtatgggaactcaaggtgttaagtattcaatcgaggctatgactagacctaaggcagtagtggtaaatgttagggagttgtaataaataaatagagataaagaatagtagagataaagaataaaggagttgtcttaaatttgattttttgtaattgaattttaagttcaactccttttttgaatctttatatgttatttcttagtaattctttttttattaatatcttaaactttgatattgatgaaatttgaacatgataaatatctcaaatttatagtcttgttttctaatgatgaagcctatttctacttaaatagagcaatttctaaaatgaacatttttatctcgagtaccatatacaatgaaaaaaattaaccttgacaagtgaccgatggtcgctgtatgataaataaaaaagaaacgaccattggtcgctaaaaggaggtatcgccctatgccaaaaggaattgtgcttacacctgaacaacaagcagaacgccgagaaaaaatagttgctgttgctttgagtctcatggctgaaaatggattccaaaaaacatcaatgagagaaattgcagttttagccaacatgggaaagtcaagtctatacgattttttcaaaacgaaagacgagattgttgtatatgcagttgagaaagaaatagaaaaaactatccaacaagttcataggattattgatggtgaaccttcaccacaacagtgccttagaaaaatcatgcttaatcatcttagatttccagagcagtatagaactgtactgatgtggttaaatacagaatctgattatttagaagaagagtatcgaaagagacttaaagatgctcgttatgcatatcaagatattataaaatcggtaattgataatggtgtgaccacaggcatctttcgcaaaacggataccgctcttgtgacacgtttgttaattaactccatgttatcaatcagctacacgtcacgaccatcggatagttcggaaaaaatgttggatgaaacaatgaatatatttctgcacggaattatgaatgatggaggtgaatgattatgatttattatgtcttgccactggaacataaacaagcaaccattgaaattgttggtggaaaagggatgtctttatcaaaactattgacagcaggcatccctgtgccagacggttttcatgttacgactgcttcataccagatttttgttgagacgaaccatattcagtctcgaattaataaactgctagatggtattgattccaataataccaaccaacttgaagatgtatctaagaaaataggggagcttttccataatggagaaatgccacaggaagtgtcggacgcaattaaaacagcttatgccggattagggaacatatcggtggctgttcgttcgtctgcgactgctgaagatttacctgacgcttcttttgcaggtcagcaggaaacttatcttaacatacaaggtgaagataaagttattgacgctgtaaagagatgctgggcttccttatggacagctcgtgctattgcttatcgtgtgaagaataatataaagcacgagattgtcgcacttgctgttgtagtacaaaagcttgcattttccgattcatctggtattatgtttacgttaaacccaatcaatggtagacgtagcgaaatgattattaacgctgcatgggggcttggtgaagcggtggtttctagcttagttacacccgatacaatcgtagtggataaggactccgaacgaattatatcgtatgaagtggcaaataaagagattatgacggttcgtacttcagaaggaacagaagaaaccatggttcctgaaaggttgagaaaaaaatatgctcttactcgtaatcaggtaatgcaactgatacagcttggaaagaaaattgagaagtattatcaaatgcctatggatgtagagtgggcactggaaaaagataaattgtacattgttcaagctcgtccaattactgttctgccaccggaatgggtattgccagaacaggatgttgtatacacaaagggaagtttggcagaacacttgccaaatcctgttacacctttgttcgccacgcttggtcttgaaatcgtaaaccgtgcatcggagcttttatggatagatatgtttggtaaaagtgcgaaaaaattattaccaaaaaacggcgcatatacggttattaatggatatgtttatctttctgctaaatcaaagccacttttgattgctatcaaatccctttccccacgctctttacgtaggacacttatgaacagcgttgcacgctgggaaacggcacgaaaaggatatgaggatgctattaaacaatgggaagaaaagcccctgcatacgatgaacgcccatcaaattatggatggtattcagacaatattttatgccgcatgtatttatttcacaaggattcagcttacattgcctgctgcttctatcagtgaaacattatttacaaaattatttcaaggagcagttcgacgtgctggtataacggatacttccgttttcctgcttgggtttgatacgattgctctgcaatcggaaaaggagttgtggggtctttcagaatgggtaaagcaaaataacagcatcaacctttatctgcaaaacagtcctgcaataaagatagcagaagatttcatgtcttcagttatgcctgttggagtttcacaggaagtatggatagaatggaaaaatcgaatcaataagtactttaaagagtttggtcgtaccgcttatgagtttgattttgcgtattccacaccgcaggaaacacttacaccaacttttgaatccgtaaaaacatttgtggaaggaaaaggggaaagtccttttttacgccagaccacgtttgaaaagcgtagaaaacatgcagaagaagagattttacaacacataggtggattgcgtaaaaaactattttttaagttgctccattgggcacaggaaacctctcctatgcgtgaaaatgctatttatttgatgggaatgggacatcctctgattcgttgtatgtttcaggaaatctcagaacgattcatacgaggaggagctatttcacatttagatgatatttattggctcacaaaatcggaattggaggtacttatagagcagttggataaaaacaagtctctatctgatatgaacgggataatacctgttcgaaaagctgaacttaaaaaatacatgggttatgtgtcaccgtccaagttgccagagaaaaacaaaaaaactatatcacaagcaccacagaagcagaaagatgggaaaattgtgttgacgggcattggtaccagtactggtgttgtgacggctccagcttgtgtactgaatagtccagcagattttgaaagctttcaacctggaagtgttttggttgcagttaccacaactccagcatggacaccattattttcatctgcaagtgcgattgtaacggacattggtggtcctcttagccattcaagcattgtcgcacgtgaatatggcatcccagccgttatggctacacacattgccacacgaactattaagagcggacaaatgataacggtggacgggttggcaggtacggtgacgtttgatgagtaaaaagcctattttcgctttgaagctttcgacctttgtgattgcgttagcggaagtagtaatacttaaagttttcagatttcataatactactaatacccaccgaacagcggtaagaaaaaccgtagcttggtgggtattttcttatgcaaaaaaatgagaatgtctcaaaataaaaatttgattagaaaaaatcaattttgagacaattcctttatttgttgatacaataatacacttataataagcaattttatattgttaattggaggagttttgaaacataagtttttcaaagtcttttatttgcaaaggtctagagaacacgtatccttgtaacatatcacagtttatttcttgcaagaaatctttttgaaaactggtctctattctctcagctacagtggtcatttttaactttttagctagttcgattatagatacaattatatttctttcacgttgagaatctaaatcttctgattgaaaaaatgctctatctaattttaatgtatcaacataaatacccttaagcatattgattgaagaatagccacttccaaaatcatcaatagagcatttaaagtcatttttatgaatttcatttattatttcactaaatactttgacatcttcaaatacaattgtttctgtaatctcaatttctataaggtgagaaggaatatcatattttttagctattttatcatatttcttgataaaattcttggatgaaaaatgataatgagacatattgttttaccaatgtcgttacatctgaatatattaaaagatatataggcttatcatcttcccaatctatacattcagctacaacttgcatgtgaaaaatatctccattaatagtttgtggagaaatagaaaaacaaacgcatctcccagatttaaaatcattatgatatttatacacattgttaagataaccttctaaatttatatcatctaatagaaaatttacattatctttgaacatatcaaaatattttttattagcatcaagaagttggaatccaaagtcagttaccttaaacttggcaatgaggcctggaaaattgttgtatagaatatattcaaagcaagatatgtctcatattttagaataatcttattatatgtaaagttaagctattttataagtctttttatccagttatgcatttttattgaccagttagacgtaatatattgaatattaagaaaattggtactatcatataaataaatatatatataaaggaggtttttatatgagtctttttgttggtggatggtcaaaatttagggctgtcgaagaagaagatttaaaagtatttaatgaagctataggaatgctaaaaggggttgattatgaaccacttattgttgctactcaagttgtagcaggaacaaattttaaatttatttgcaatgctacttcagttacaaatcctccacatgattatttagcagagataattgtttttaaacctcttccttgtgatgaacataatgcaacaattacaagtattaatataattaagtaatattaataggaggtggaagatgagactaaatgtaactaaacaaaatactatagaggttgaaaatagtagaaaagaagatgtttattttgtaatagttgataatgttttttttgaacgtcaaggtgatgtatttaatagtatcacgaataataatttaaataattatgatgtaaaaatattaccaactgataatgtttttttagaattaaaaataacatctactaaagatttagaacctgtttttattgtagttgaagatagacaatacaatcatggtagtataatgtttaagccagtattggtatagaatttaagcaaataaaagtgaactattcaagtaggtataggtgaactatttaaactaaaggaaacctattaaaccagtatagttgaactatttaagcaaataaaaataaaatattcaagctggtataggtgtaaaacttaagcagtagtataggaatgtttaaattaatggtacaaatataattaaaaatctatatgtaataaccataggaaaatagtggacatataatataaaaaaacaactgtattacataaaatacaataaaataagcgcattaaataaaataactgtgttggtaaaaattatattatacaacacagttattttaataaacaaagaagaataattattgagtgaaaatgcaaatttattaaaaataaaaaacaaatttaaatatagtctaaaaactttgtaatctacttaagggattaaactttatttaaataaaatatataaccaagggggaaaataaatgccagaaaataacaatcaacttttagaagaaataacactcttattaaatgaaggaaaagtagcaataaataaggctgaaaatcaaaatttaattctaattcttggtgggacaggatgtggcaaaagtactgcaattaactatcttgcaggatgtgtaatgatggaagtagaagatgaagatactggtatatcatatattgattgcttagaccctgtggcagagattggttcaggagctgtttctcaaactttatacccaaacattgtaaatatgagaaaaccaatagaaggaatggatgcaaaattatgtgatactgcaggttttagcgacaataggggagtagcccatgatattagtgcagcagtttcattaggtgaagtatttaaaaattctgcatctatatgtgcagtaattgtattgattaaaaaatagctacgcacactcgtgaatttagtcatgagttagtagctaaaatagtcagcatatagggaaacctatatgtagagataggatagagcctatccaatactacttgaattgctggaaacccctaaagctaaccaaactaaaacataaggatgaaataaacctaagtgtgaaagttacgaaagtagaaaaaattggttagatggtataaggttaaaccctaagtactttaaaatgggcaatcagcaggtaagctccgaataggagaaacttcaacgactattcctcttgagggaagtacactacaagctattggtagtggaagtgggtagaccttagcggataatgccgaaggataagatatagtctgtgcttacatgaaagtgtaagaagttcataagagaactgcataggtagtagcgaacttatgtgaacgacaacctcaaaaatgataaaagttaagacttacggttcttaaatatgttatttaaaattaaatataaaaccttctaaataattgttttaaataattacatttgttaatattatgataggtgattaataaattgttcaccacagtattatacaatatattaaatatgataaaatcattaaaatgtgtatcaaaaaacaattagagtgaggtagtagtagtggaaaaagcttataagtttagaatgtatccaaataaaaaacagcaagagttaattaacaaaacttttggatgttgtagatttgtatataataagtatcttgctaaaaaaatagaagtttataaaaatgataaagaaacttttacttataaacagtgtagttctgatttgaccaatttaaaaaaagaattaaagtggcttaaagaacctgacaaattttcactacaaaacgccttaaaagatttagataatgcatataaaaaattctttaaagaaaaagcaggatttcctaaatttaaatcaaagaaaactaatagattttcatataaaactaactttacaaatggaaacattatgtactttagtcaacatataaaactacctaaacttggtatggttaagataagggataaacaagtacctcaagggagaatacttaatgctactatatctaaagaaccaagtggtagatattatgtatcattatgctgtactgatgtagatattgaagcatttgaaaatactaataatcagataggtttagatttaggaattaaagaattttgtatctcaagttgtggagactttatagaaaatcctaagtatcttaagaagtcattaaacaaacttgctaaattacaaagagaattatcgagaaaaacaatcggtagtttaaatagaaataaagcaagattaaaagttgcaagacttcaagaacatatagccaatcaaagaaatgattttctacaaaaactatctactaaattaataaaagagaatgatattatttgcatagaagatttacaagtaaagaatatgattaaaaatcgtaaactatctcgcttaatttctgatgtatcatggtcagaatttattcgtcaattaaaatacaaggctaattggcatggtagacaaattgtaaaggtaggtaaattctttgcaagttcacaaatatgcaataaatgtgggtataaaaacgaggaagtgaaggacttaagtataagagaatggatttgtcctagctgtaatgaaactcacgatagagatataaatgcaagtataaatatattaaaagaaggattaagactaataacaattcaaaataaataacttatgtaagaaccgtaggaactacggggatggcctgtggagaattagtaagacatattttagtatgcaaaattctgtgaagcaggaaccctgtgactttagtcatgggaggttcagaccagaagcagatatattagattctagacttacaaaagtactagacctgtttcaacagttaaatatgtgtcttcataaagacaattttaggggcagtataacttttttcatttcaaaaagtttcttaggaagaacagaaaaacaaatatataatgttataaaaagaaaatatgaacaattatgtgaaaatttagatagtaatatagaggaaaaagcttggttatttgaagaattgctaaaagataatggtaaaaatattcatctttgtaagccacttgaatcagacgagagggaaggcttattaaagcaagtactagaattagatgaagttaaagataagacatcagcattccaatatccaattagtgcagatgcaagattagttttagatacgttgataaaagaaattcaaaacaatatcgtatctagcctagaagattatgttaaggcgtatacagaagattttatcagtattattggaagtataacaatgattcaagaaatagcaaaatatgatgaggttgtaaaagtatttaaaaactggttggaaagtacaacaactcttactatagagagatttatcaacgtattagccaaacaaagtggcttattcttacaagatagttgcatggaattacaaaataagataaaaggaaacttagatataattgatgctttaagtaaatatacagaacatggaactggggaaattttattaccttctgtacatatggaatttattatagaaaaggcaagtaagaagataatggaacaaaacttcattataataagaaagaatttagaaaaagttttagtttcttatgaagtacaaaaacaggtatttacattaccaaatagagaaaaattaatggaagttgcaaataaaaaggattatgtatatagtgtaagtgattttaattcaattttgacaaatgttacagttacacaaaatgaagagttagaagacagtataacaagattaagtgcatatggagaagaaggtaatgagataattagagaatttattggtaaatacattttaaatccatttatagtaaaaacaattaatattaatgataagaaaggtattgaaataagagcattaattccaaacttagtaattagtagtgtattggaatatttcaaaaatagaaaagtagatgacaatgtttctacatttatgttctttgccaaagatactatttatatggatgataaccttggaatggactttgcatcagagaaaaatattattcttgcttgtaacaatcttgatgtaggtagtaatgtaaaaattaatgtaagtggaaagagcggagaacttgtagatagttctatgtatgggaaaaatggtgaagatggtagagatgcaggtaatatttacttatatattaaagaagaaattagaaattatcgtttaacactgattgcaaatggaggaaatggttctaaaggaatagatggtaaaaatggtgaaacaggagattctggaagtaatggagctgatgcaggatatacaagtagtttccatggacagatgtttaaagggtattttgcaaaaggtacaagtggtaaaaaaggtgacaaaggtggagctggtggaaatgccggaagaggtggaaatgctggtaataaaggtaatatttacttcatttcagactcagaggaacaaaaaaatagaataattaatcattgtgatataacagtgaaagatggagaagcaggtccaaatggtagaccaggttcaggtggatatggaggaagtggtggctatcacggatataatacactttcattttctccaagtggtatagataagactgtttactatacaggatattttacaagttgggattataagttagatagtataattaaatatcatatagaatttagtggcggaagttggaatgaaggcaaaacaggaccagcaagagaatacgctgaatatggagatagaggagacgacggaggatttaatgctccaaatactaagttatcaacagctgtttcaaaggtagaagagaatcttattaaagaaaaatatcaaggctattgttccgaaatatagaaagggatggatgtatggcaaataaactttatagtgaaatcgtaaaccttttggaagaaggaagagacgagcttagaaaatatgacttaaaagaaaagtcaattttgttattcttaggtgcttcaggcgttggaaagagtacttgtataaattatttaaaaggttgcgtgatggaagaaaaaacggatgaagagactggacaaatatatataactgcaaaagattcagctgtcgaaattggaaatggtgtatattctaagactttatgtccagaagttgtagatattgcaaatagaaatttttcattatgtgattgcccaggtttttttgataaccgtggagcagagtatatgattgctggtgctatgcttgtaagggaaactatttctacatcttcaaaggtgaaagggatggtagttattttagactatcaatccttactggactctagacatacattattgatagaaacaggcaaaaatttgaaagatatgcttggtgattatgcaaagtataaagaaaatttcttctttcttatcaataaaatacctaaaacactaatcggtaatgtaacagaagaaaaaataaggaatatattggaaaaagcaaaagaagacctagatagtcaagagaaagattacgacggttgtaaggaattagtgtacttattaaatgtagcattatcagatggtgtatctattaaattatgtaatccactagatagacagccagaaaagttgttggatgaaatgaaaaatctacctgaaacatttgaaaaaacagatttgggattgatgcttactgcttcttgtaaaatagaaatacaaaaagccgttgatgtaacctataaagacctagaaaaacttttagttccttatatagaaagtgtcaaaaaaggtatggaagattctatttccattctatcttctataaatagtctaaaggataaaaagactcaattagataagatgtatacagatttatgtagtaggactaataatatgaaagagcttatggagtttgtacaagaactttcatatggtgatggcgtacagaaagtgaatatattagaagaaacacgtcttcttttagagttaaatagctactgtagtgagactcatattgttggtctaagtgagttgttaaaatcattgctaaaaaatactttagaagatacattaaaagatatcaaatattggatagcagaagaagaatatagggaagaagaagccaaaaagcttgaagatgcagagtataggatagagaagattcaaagttgtacatatataaaatcatatgagaaagaaaatgtactttctatatatattcctatacctaaagtgaatttatcggatttgactaaaataatatctggttatcaacttaatattttgtcatctatatatatgtatggagattgtgagttgaaaattgactgtaatatggagaaagaagtcttctcaggtaagaatattgtactacttacagaaaaattatgtataccagaagggatttattcaatcaacgtatctggtaaggatgcagaaaaattggttggagaaggttctatttacgacggaatgaatggaagaaatggcaataatgcaggtacttcaggtgatattttattatcttttaaagaaatagaaaaaagaggagaacttaaactttacgtagatggtggacgtggtggaaatggacaagatggaaaaagaggagatacagggataactggagaagctggggaaaatgctaaaataggttctaaaaaagagtcaaaagaatttgctaaggttaaaggtacaaaatactatgtggtaaaagcagaaaaaggaaaacaaggtggaactggaggcacaggaggtaatggtggaaatgcaggtcttgggagcaagtctggacaggtttatctccttggaaaagcttctttattaaaaggtgctataagtaaaaaagatggaaatcatggtctagcaggaaaaggaggctctggaggagctggtggtgcaggaggtcttggtggaattagaggtatatatgaagaaacaataagatatataggtacctctgctccaatagatgacagtgatagaaattactattattttgatagatatgtgtttaatcatgcttcaaatgagaaccaagtagcagatgatggagagaaattaaatgctctttatgaaaaacataaggactggacaattagcaaacgtgaagattcaggtttagtcggagcagagggaaaagacggtcgctctggagatgcattaaaagaaaaggaattgttaaagcaggagtattctttgtcaatagataccttcttctatgaatttttcgagagatttggtttttctggaattaaaggttatagaaatcttagactgttgtgtgcagtgggaattttagaagctgatattttagaactttcacatatttatgaaatttttcatgcagttgagaaaatagagatgcaattaaatagagaaatacttcagaagtactatagttttgagaagaaaaataaagcagtgctttctctggatgatatgaatataaagaaagaattttataaggaggcaaaggaaatctatgaataccttataaataaattgatgcagtctgatagaatagaatcttttataggagaaaagaagaattttagcgaatggagtatgattttatttgcacttgaacaaaaaacagcattctatgtgcagatgattgaagaaagtgaaattggaggaaatcgtgttacagatattcgttctttgacagattatctggacaagaccttaagagaattggaacaaggaaagaaagatgagttaaaagaaggatatttcaatacttataaggaaagtatcctaactcaaattgaatctggaaatcaacaaatagaagttttaaaagatgaacttgagaataaaatgctttctgttaatgcaaagatgaacctgttgattcaagaaattataaagatgaaagaagaggagcaagaagacatagaggaactaaaaaagaaacaggcaaaacttgaggaacaaatgaaaacacagttaattctttctggaatacaaagcgcattgagtttactgactgcatttagtggtgttggtcaagcttgtctaggggcatttgacagtgcaaaatctttgaaggaaaatctttcagctaaagaagaggaataccaatggactaacaggatggttgatttttcagattttaaattggattctgatggtatgagatttgtacttggagaacagctaagtgaagatagaaaaaatgctttagataaaatgacttataatttggcaggtgttgatgaagaaagaagaactaaatttgaccaaattaaggagattatagttaagtctatagatgatgataactatgcagaaaaagctgacgatattcaaagagcaaaagaggggttaagtgaaagcgagtataaggaaatttacacaaaaatccagaaaaaagaaataggtatgttggaggcaaattacaataataaacagcaaaaagataagttagctgcactagagaaaagtaaacaagctattgaaagacagcaaaagacatctaaaattaaaaatgcattgagtattggaagttctgcttgttctcttataaatactgcgattagtggtgttaataattgtcttaatgtaaaatctagttttgagagtaaaatagaggtagttaaagaggcaattaaagataaagaaaataatattaagaaattagatgaattgaatactcaaatggtggaatttaaagataaaactttgaaagaatctgttataccatttgtagaaaaattcgatagtacagttaaaaatcaagatatttttgaaaatgagataagtaaattaaagatgaaggaagttttaactgaattaagcacaaagtttggaagcttaaaaatggaaaattcagaggagatttctataatatttaaaaaagtacaggatatgatggaaactcaaattatcattactgataagattgataagaaaaaagataatcttgcaatgggagaattgatttatcaaatgtcaggtagtggtaatcagatgaatgaatatcagaaaaaacttatccatcaaattgaattaaatcaggttagatatttgtgtcaggttgaggcagcagcttttcaactatggacgtttccatttggaagcaatatagtaaatatcttaaatagatgccatgtaggtattacagaagatgaaaacgaggttataaatcaggcgaaagagcaaaatagacagattagagagtttcttgaccaagatgcttaccaatggcaaaaaacggataaccatattttgaaggtagcattaacaggcagtttagatgggaaatcacgtgtgggatttgaaaatacatattctctatatgattgtaatgaagaagaagtgaaaaagcttttgacaggagatgaaattagttttgaagttccattaaataaaaactttgatgccataaaatatgtaaccatgtatgcaaatatcccgaaccttagacgaaatattttagaggatagtttaaaagtaaaggtgcatattcatttatatgatagtggatacttctccctatatgatgataaaaaagatgtctattatcaatatgtatttccacaaaactatatagatattacacatggtcttgatgttaaatacaatgattcagattcaataaactcaatatggtcttcagtagaagataaaggaattgaaaagttcaaaaatgcaggattaaactctggtagaagtccatattctatggctaagatttctttgaaggcacattttaataagaagctttcttatgattcacttacaaatgagcagaagaagaaactagaatcatactttgataaacctagtaagtatgcatggagcgagagtatagatatattgaagagtctagggtatattgatttgaagggaattttgtcaaagagttggtatgaaatcaagaaagatatagatagtgatggggagattatgaagcatttttctatattacaagttgatttattggaaagaattatttatgagcagactagtatactaaaggaaaatatacctaatttgacaattgaattggtaggctgtggtatttatgtagagtctgaatttaattatctaaagcaaaatgatttaaaatgctatgaagaaagattggttgaaaatacaattatttgttgaaaatataattaatatataagttttaaagaaatttacaaaaggggatgtttcaaaatgaaaatttgaatcatctcctttttgtaaaaaatagaaataagttgagtttaaaatttgtaaaatatgttttatataattttgattagaaaaaagctccttttaagacagtttctttttaaaagatgaattataaattttttatatacatatgttttatataatggggattaatagtagttataagtattggtgttttccaataaatttgtcatactgtttaaacttattccaacagtagatgcgttgtgtaaaaaggcagatgtacttggtctaacaaatccacttacgccaagtaaaatcagacctaaattaaagccgataataaacttagaacttaaatcaactcttttcataagcttattactaatctgctttaaaacgattaaattattcaaattatctgctgatatggtaatatctgaaatctctcttgctatttcagcaccttcactcattgcaattccgacatctgattctgaaatagcaggagaatcattgattccatcaccaatcataattactttgcgaccttttagtttttcacttttaacaaaattggctttgtcttctggtaagacttctgaataatattcatcaacaccaactttacttgctatagatttagctgttttttcgctatctccagtcatcatcacaatcttttttattccatattctcttaaatttgaaattacatattttgcttcttttcgtaaagggtcatttatgcaaataactgctgataatttacccgatattgccataaataggtgagaatactcatctgatagattgttgtacttatcctcctcaccgtctgggatagtacacttctcatcttcaaatacaaaatgtttgctacctattacaacctttttatcatcgacctttgttgaaatgccatgagcaataatatattctacctctgtatgcatttctttgtgactaagcccttgtttttcagcttcataaactactgcatttgctatggagtgtgggaagtgttcttctaagcaagctgcaagtcttaacatatccttcttattataattttggaatgtaattatatctgaaacagttggttgagcttttgttaatgtgcctgtcttatcaaatacaatagtatctgcacatgcaacaccttcaaggaattttccaccttttacagcaatgctgtgattgttacattctctcatggctgatagtactgaaatagggatagagagttttaatgcacaagagaaatctaccatcaatatagagagtgattttatagggtttctagtaattgcataggttaatatacttcctaaaaagctgtatggaactaatgtatctgctagatgttcaaatttactctctacagaagattttagtttttcagattcttcaatcatagttactattttctggaatctagtagtaccagctttttccttgacgcacataacaatattgccttgctctattccagttccagcatatatgtaagagccttcttttttgttaactgcaagggattcacctgtaagtgatgcctgattgaccattgcttctcctgatactataactccatccaatggaatcatatttcccatagttacactgactaaatctccttcctttatctctgaaattggaactagtatttcagtggcatctttttttaaccatactttttcaatgtttagtgacatactttgagccaagtcgtctatagatttttttctagtccattcttctaataactcaccgataccaagaagaaacataactgaaccagccgtattgatatcttttctaaaaatagaaatacctatagcagtggcatctaaaacagaaatttctatttttttatttagtagggaagagagaccttttttaaaatattttatagaatgaagtccaattaaaaaaaatcttaaggactttggaaaaaatattttggagatacttttgactagcagtttatttgctaatttgtctctataataattgtttaattccctgctggtatgttcaggaactaggttttctattttgctattgttaaaactgaatttagtgatttctcttattatgtattctctttcaccagtgtaataaatgactgcatcaccagttctatcgtaaacttttgctttggtaataccatttatagaagttaaataatataagagagtatcggactgcttgttgtttaatttgccaagttgtaagtcaaagcgtatacgacctcttatttcgtgttttatataaaaattcaatttacttcctcctgatattattaatcataataatcattaaatttattctgttgtacaagtattatttttttcttcaattacgttatctttgatttcttcacatttaatgttattagaattagtatcttctacagtttttatagtttcagttttaagaacttcttgttcgcatttaagagtatcttgtacaacgtttaccttagatgtagataagtcttcttgctcgttgatttcttttgcttcagctaaaatatcttctacattttcttgaattttcgtagttgtttcaagaacagaatctttaactttcaatgctcctgctgttgcacgagtgcaagttttttttacacagtcacttgaaagtatcttaacacctacagtaccaaaaagtactcctcctaaaaatattcctgtttttttcatttttaaaatattcattttacattatcctttcatttagttagattttgtttatacttatgtataaggtaacaaatgttaaaaatagagtatgttttacaaaattagtttagagagtttagtaattttatttgatttatattagtaaatttacatgaattttacatgtgtagtttatatagttgaaataatttttatatagcttatatatgcagtttatatatctagtttatatatctagcttatgtatgtaatttatatatgtagtttatatagttgaaataattcttatatagcttatatatgcaatttatatatctagcttatgtatgtaatttatatatctagcttatatagttgaggtaatactttatatagcttatataatttatataaatttataaccgaatactacacagtttatacataacatattgtttgagcttatctagttcatataaatttataacttatataaattttttgtactttgtattttagaaagttcttgatatttagtccaaaaactttaaaatacagtaaaagtaataattgttattaatagatttgtaaaatcatatgacatttattaccatttatgcaattaagtatagcatgtgtaaatggtattttcaacagaaaatgataatttatatcaattaatttagttgatttgtaatagagcatcaaaaagtatacttatttatatatgggaatgaaaggcaaagttttagttttttcaattaaagtgcgttagatatattattataaatgaacattattttaagtataataatgattaggagggagtgtttatgatgtataaatgaataacaatatagtttatgattgtaaatattatgtaaatataaaagttacttaaatggttttaggaaattgatattattgtgtctgggagattgtacttacttcaaaaagaggaggttatgacaagaaatgtgttgtttgacatttatacaagcagatattagaatgaaagaaagttaatttatatttctttgttttaagctaagaaggcgagctaggcaatttaaaatatattgaatggagaaaaactatgaataaaaacaacaatttagttattatatgtatgtttataggcatgatacttggaatggctataggttgtgctataggtatttctaaaggaaatgtgggtatcacaatgtgttatggtctaatttttggaatgataattggcatatgtatagggactgttatcaaaaattctaataaaaaagaataaatgaattttgatttactaggatgtttagttatgatttatttatgataaaactttttaattatctgtaaaaagtagaataagacatactaaataagatatactaatagatattttttatattatttttttaatatggaaagaatggaatttatatacactatatttaaatcacaaaaaataaaagttaattttgtttaggtggagatttttttgctcttatatattgaataatatcaagtaagtctgcatcttctaaaatacgatacttaatccaacctccattattgccacaagtataacgagtgacccagagttctttagcttttggtgtcaaagataccaacgttttttctactgctggaacttgcttgtcacctatctgaatcagaacagtaaatgcacctttttcaaaaaaagcataaaataaatgaaaagatttatggctatatttgtaaccccaaccataattgtttccaaaaggaaatcgaagttctcttgataaattatattgagtttccaagtaagtttccaacttacacaatcgtgcatatccatctttacctatatattctattatttgagacaaacagggtttattgcttttatcaagcatacgttcatacattataatttacctccatttttacttttaattatagcaaagtaattatgacaacagtatgtcaagtttttatgtcttattatactaacatgtaaaaatataaagtaattatttttagctaatagaaaaatatgatatttatatatattggaaaaaaatgtaaaataatgataaaatatagtttataatacaaaagtataattacattataattatatgtgtttagttggatttgtgtatttaaataatgtataatttatgctgattactgctaaaaaagcataataatattgtattgtaaggttttataaacttctaattgaaaggggataattcaaatggataagagatatttagaatccgatgtatttgaagcttttcaagaaagactttcttatctttttaatgaatttgattatatctatgtatcttttagtggaggaaaagatagtggcttactgctaaatttagttttggattataagagaaagaataatataagttccaaaataggagtatttcatcaagattttgaggctcaatatagtttgactactgaatatgttgaaaaagtatttgaagagaatattgaagatattgaaccatattgggtgtgtttaccaatggctacaagaactgctgtaggaaattatgaaatgtattggtatccatgggatgatgagaaagaagaattatgggtaagagaaatgccagtcaaagaatacataataaatcaaaaaaataatccttttacttattataagtataaaatgagacaagaaagtttggcaaagcaatttggtagatggattagagatatacatgaaggtgcaaaagttgtttgcttattaggaacacgagcagcagaatctctacaacgttattgttctattgtgaataaacagcatggatataaaggaaagtgctggataactaaggaatttaaaaatgtctggacggcatctcctatatatgattgggaaatagaagatatatggttagcccactataaatttgattatgactataataaaatttatgacttattctataaagctggagtagctccaagaaaaatgagagtggcatcaccttttaatgattcagcaaaagagagtttaaatttatacagaatattggacccagatgtatgggtgaaattggttgctagagtacaaggagttaattttacttctatttatggaaaaacaaaagctatgggatatcgtagtgttaaattgccatatggacacacatggaaaagtttcacatattttttgcttgataccttacctgaaaatataaggaatagctatattaaaaaattttcaacatctattgagttttggcagaatacaggtggtggtttgtcagaaatagttatacgtgaattgttgagaaaaggttataaaatagaattaaatggagtttcaaatcatacaaaagataaaaagagtagagtcatatttttggatgatatacctgatgatacggatgatattaaatttaccaaagatataccaagttggaaaagaatgtgttattgtattttaaaaaatgaccatatgtgtagatttatgggatttggtcctacaaaagaacagagaattagaacggaatatattaagaagaaatatgaaaaaattcattagataggagttaagatgctatggaatataaaagtcctgtatatggaatcatcgcagtgccaatcgaaaagatagaatctaacgactataatccaaatgcagtagccccaccagaaatgcagttgttgtataaaagtataaaagaagatgggtatacaatgccaattgtctgttattataatgaggaaaaggataagtatattattgtagatggttttcatagatatagagtaatgcttgaaaataaggatatatatgatagagaaaacggacttcttcctgtttcagtaattgataaatctcttgatgaaagaatggcaagtactattcgacacaatcgtgcaagaggttctcataatgtggatttaatgagtaaaattataactgaactttgtgaaattggaaaatctgatgaatggatatcaaagcacctgggtatggaagttgatgaaattcttagattgaagcaaataactggattagcttatttatttaaagataaagagtttggtaatgcatggattccctttggctctgatatagaagaagaaaattaaagagatttattaaaagaaaaagatatattaaaaagagaaaatttaaaatatatattgaaaataaagagctttaatattatatataagcacagaaaaaagagtaggaaaaatatcctattctttttttatttttataattatacttttagaataaataaaactatataaattaatgtattttaatataaatttatttgttaaaaatagtattaaattgtatatttatatcgtttttaataaaaaataatcacattttatttaaaaatgaataatatatagtaaatagtaattaagttataaaaaattgtataaactctatattatttatttaaaatagatatttatgaaagattaattaggaaaatttttataggtaaaataagaacaaaaaaagatacttatttaattatttaatcttattaaagacctattaaaactactgactataatatagaacaagtatacaatttttaaaaataatgctattttaaaattctaaaaattaaggaggataattaatgggatatttaaaagaggataaacaagactattgttgtgaatttgctagaccatacatcaatcgtcaaatttatgatgacacatacaatccaaaaacagcattaaaaagaggtactttatttcctgaattagatttaatagagtcaaataactataatgattggctatattcaaatcctaaaaatagagttagagctaaaaaagggggtaacatgtactaatgtcattaaatagaagagaacttttagagagaatttcagaatatcaatttgcctgtatagaattaaatttatatttagataacaatccaagggataagaaagctcttgatttatacaatagatactgcgataaatttacacaagctgtgtgtgattatgaatctaaatatggagcattaactaattttggatatgaatcaagtgaatatccttggtcatggatatctgaaccttggccatgggacaaatcattttataaataaaattattaagttttaaaattagaattattattaaatatatattaaggaggagtaagataatatgtggatttatcaaaaaacactggaacatccagttaacataagacaagcagaccctagaatggcaaaatatatcatgactcagttgggaggacctaatggtgagttggcagctgcaactagatatcttcaacaaagatatactatgccaactggaaaatctcgcgcacttttaactgatataggtacagaggaaatggcccatgttgagataatttcttcagtgttatatcaattaataggcagttgtactccggaagagcttaaggctgctggacttggtagtaattatgctaattttggacatggtcttcaaccagtagattctaatggagtaaactttactacaagttatattaatgtctttggcgattcggtaactgatttacatgaggatatggctgctgaacaaaaagcattggctacgtactatcaattaataaatttaactgatgaccctgatttgaaagatatattgagatttttgggtgagagggaagtagttcactatcaaagatttggtgaagcattaatggatgtttatgagtttacagagtgtaagcatcagttctaattaagtattaaaagtgaatagagagtaagcatcaattttaatgaagtattaaaaatgaaaagagaataagcatcatttttaatgaagtatcaaaaataaaaagagtgtaaatattagctctgataaactatcaaaataagaggtaaaggttttagttgatttcttttatctcttattttttattgattaaacagattactttgctatttaaatatattattttagcaaaaaaagtccaatcaaaagttcaaagtattaccatagttcaaagcattgccgttgttagtaagttttttacaatattttttatttactctttggataatcaaaagaaataaaaaatcatatctctttttttatatttctgtacacttttggagaatatcccgttttttctttaaaacatttactaaaatagattacttaatgaaaaacaacttttatatcaatatcacttattagctcatctgtaccctttagaaattcagttgcttttaataagcgaaactcagtaaaatatttcttgatgttatatcgatatttttttgtctatttagtgataaaattataatatacacttctataaaagttaatacagtaggaagcttaaatgtatgaattttatatccatcaaagggaaaggaaaaaaaggatgaacagattcaggtaaatataaaactaatatgatatgaggatagatattataacgaaagtgtagtcagaaggaaattatattagtatgtttttacataatggcagatagaaaagaagtgtctaatgatttgagtgaagttttcagaatataaggaggaattgtatgcaatatattagctattaccatagtccaattggaaatattcttttagcatcagataatgttgggttaactggtctttggtttgagaatcaaaagtattatgcttataatcttgaccaagaacatcaagaaaaagaattgccaattttcgagcagacaaagaaatggctagatatttatttttcgggagaagagcccaattttacaccatcactccatatggtaggtactcctttccagactacagtgtggaaaattttacaacaaataccatatggtaaaacaatcacttatggagaaattgcacataaagttgctcaacaaaaaggaatatctaaaatgtcagcacaagcaatcggtggtgcagtagggcataatggaatctctattattgttccatgtcatcgtgttgtaggaacaaatgggagtttgacagggtatgctggtggaattgatagaaaaataaaattgttatctttagaaaaagtatctgtgcaacattattttatcccaaagaaagggagtgcattataaagccattaaatttagaaattcttaatcatttatttgatatataaacatctaattttgaaagcaataacttgcaattttaaaaaactattctttaaactatatgttatacaaccttattcctagtaaacattatataactttagaggtagttttagagcttgtattttggaagtttattttcttttttcgtgtgagtagttatatgtttagatgcagtaatttatatgctacaaacaggaaaacaaggagcagacaaaaaatacttagataatatgttctttgtgaaaggttatgttgaagaacttctatttttagataacagttatgatattgtattttcatgtattgtatttcatcattgtacaaatgttcaaaatatattttgtatattttggaaatggtaagagtgttaaatataaggggaaaatttataatgattgatacttaagctactcattaagtattaagaaccatacaagataaggttgaaatttatatgcttcgttttatgtaaaaaatgtaagtgagttagaaataaaagaattatttataaaaaatagattaagtattggaaaatatgaaaaatagatgttgaacaaaacttagtcgattggttaaatttaaccaaacacttaaagtatcaaaagaaaaaattattactcttaagcaagaagatataaatggaaaaatgaaaacaagattttatccttttataagtgataaggggatatgttttaatcaaagatggacttttattttaggctgaaaaattatataactatattatagaatataagggagatacacaactttttagtgttcaatctcccttattttttattattatatcaagactcatttagtcgtgttaattttaggataaaatgagtattttttaataaattatttataagtaaagtgtgttgtcggataatcagtatttctgtataaaatttggtataactttaaagaagtatgtgaaattttcaggtattttttactatggtatattatttaactgattttaatttagcaatatcattccaattcttagatgtgactatctctatattgtttaaatcatttttaatatctgatgtatcttctactaatgaagaggtatgtttaatcactgtatctaatgtatttctgttaatttttacatctgacttaatttctgtaacatcactctgaattgtatcaagtctactactagtttcaacttgtccagtttttaagtctttaatatcaggttccatattgtctaatctactattgacttctttaatttcaccttgcatatcagtaatactgtcttgcatactattaatagtgccatccatactactgatactgccttgcatatcgctaatagtaccttcgatatcattgatattgctttgcatatcgctaatagtgccttcgataccattgatactgccttgcatatcgctaatagtgccttcgataccattgatactgccttgcatatcgctaatagtaccttgcatatcgctaatagtaccttgcatatagttaatattaccctgcatatagttaatattaccctgcatgccattaacagtaccttcgataccactgatactaccttgcatattactaatattaccttgtatttcctgtaataattctaatattttttcatccatcactatcacactcctgttttattattataacataatttaggtgttatattccacaaacgctatgtcatatttaatttttaatcatataattatctgctattcaaaacatggttaaatatatctatattgagaacttttttattaatgaatcttgtgtattgtctaagtgtctaagatactataataagtgtttttgaggcatatgtggttatatttgtatttaaaactgctggtaatatcataattgattacttgtgtttgaatattttgattagtagcttcctttttatttctttttattcttagttttaaactttcatatttccttgaaaatttattggcaatgaaagtgcatgaattttttagctattttttatgttacaatatgaatatataacaattcgacaaattggatttttgaaaggagtaaaatgttatgaaaatgccaaaagagagtattgatacgattatgtttgctccttgtggaatgaattgtatggtttgctataagcattgttatcacaaaaagccatgtgctggttgtttgaacagcgatacaggaaagccagaacactgccgtaagtgtaaaataaaggattgtgtctgtcaaaaagggttgttttattgttttgaatgtttcaattttccttgtaaactcataaaaaatcttgaaaaaagttataacaagagatatcaagcaagccttatggaaaatagtaaatttgttcagcagtacggtttagagaagtttatgcaaaagcagaaggagagatatacttgttctaaatgtggaggaattatatctattcatgatagggaatgtagcgagtgtcaagaaaaagtgaaatagctagatcactgtttatcaagatagaaaaaattgtaatatatatataaaggtggattatattgaggtggtatatagtgataggtttaaaatgtggtatggttaaattattggaacatcagatgatatgggataaaagtgcaaaagatgtcattatattattgaaaagtatatgggataagactgccattgatattcaacacattggaagcacttctattcccagtattagcgcaaagcctattattgatattgttgtaggtgttgcttctttagaggaagctaaattatacctcgaaaggttagagcaatgtggaatcgtttttcgaggtcaggatgtaccaaaacaattactttttgctatgggagattttgagaaaaatactcgtactcaccatattcatgttgttgaatggaatagtgtcgcatggaataattatatcaattttcgagattatctaaatacttttacagacaaagcaaaactctatgatagtcataaacaaaaattagcattacagtttgaggacaatcgtaaaatctatacacagagaaagcaagaactaataaatattttgctggaataagcacgactgtggagaataaatacctaaaagaataaatttacatttattgagaaattgaacaattattttcttatatttagtaaataaaaatctatttttgttgattaaaaaatatctgtacacactcatgactttagtcattggaggttcagattgtgtagaattattggatgaaggaggaacagtatgaaaaaggatacatctcatattatcaaacgggcagagcactttcaggtaattttgattggtgaaggacttatggttggggctgtggctggtttgattgtgcttttatacaggatacttttagggcaggctggtacttggcttagccaaattttaaaatttgtagaaggttctacaataaaaataatagcttggtttgcagtacttgcagtacttgcgtggattgtatcaaagttggtggactgggagccaatgatttctggaagtggtatccctcagcttgagggggaaatgacagggaaaataaaacaagtatggtggcgagtgttgcccacaaaatttattggaggattcttatcacttatgggtggtcttgctttgggaagggaaggtccttccattcagcttggtgctatggcaggtaaaggtatttctagagctcttgaccgagggaagacagaggaaaaattcctgttaacctgtggggcaagtgctggattatcagcagcctttcatgcaccactggcaggtgttatgttttcacttgaagaagtccataaaaacttttcagtatctgttttaatttctgtgatgacagcatctttgacagcagactatatttcagccaatttcctaggaatggagtctgtattccagtttgattaaaaaatagctacgcacacttgtgactttagtcatgagttagtagctaaaatagtcagcatatagggaaacctatatgtagagataggatagaacctatccaatactacttgaattgctggaaacccctaaagctaaccaaactaaaacataaggatgaaataaacctaagtgtgaaagttacgaaagtagaaaaaattggttagatggtataaggttaaatcctaagtactttaaaatgggcaatcagcaggtaaactccgaataggagaaacttcaacgactattcctcttgagggaagtacactacaagctattggtagtggaagtgggtagaccttagcggataatgccgaaggataagatatagtctgtgcttacatgaaagtgtaagaagttcataagagaactgcataggtagtagcgaacttatgtgaacgacaacctcaaaaatgataaaagttaagacttacggttcttaaatatgttatttaaaattaaatataaaaccttctaaataattgttttaaataattacatttgttaatattatgataggtgattaataaattgttcaccacagcattatataatatattaaatatgataaaatcattaaaaagtgtatcaaaaaacaattaaagtgaggtaatagcagtggaaaaagcttataagtttagaatgtatccaaataaaaaacagcaagagttaattaacaaaacttttggatgttgtagatttgtatataataagtatcttgctaaaagaatagaagtttataaaaacgataaagaaacttttacttataaacagtgtagttctgatttgaccaatttaaaaaaagaattaaagtggcttaaagaacctgacaaattttcactacaaaacgccttaaaagatttagataatgcatataaaaaattctttaaagaaaaagcaggatttcctaaatttaaatcaaagaaaattaatagattttcatataaaactaactttacaaatggaaatatcgtgtattgtggtcaacatataaaactacctaaacttggtatggttaagataagggataaacaagtacctcaaggtagaatacttaatgctactatatctaaagaaccaagtggtagatattatgtatcattatgttgtactgatgtagatattgaagcatttgaaaatactaataatcagataggtttagatttaggaattaaagaattttgtatctcaagttgtggagaatttatagaaaatcctaagtatcttaagaagtcattaaacaaacttgctaaattacaaagagaattatcgagaaagacaatcggtagtttaaatagaaataaagcaagattaaaagctgcaagacttcaagaacatatagctaatcaaagaaatgattttctacaaaaactatctactaaattaataaaagagaatgatattatttgcatagaagatttacaagtaaagaatatgattaaaaatcgtaaactatctcgctcaatttcagatgtatcatggtcagagtttattcgtcaattagaatacaaggctaattggtatggtagacaaattgtaaaggtaggtaaattctttgcaagttcacaaatatgcaataaatgtgggtataaaaacgaggaagtgaagaacttaaatataagagaatggatttgtcctagttgtaatgaaactcacgatagagatataaatgcaagtataaatatattaaaagaaggattaagactaataacaattcaaaataaataacttatgtaagaaccgtaggaactacggggatagcctgtggagaattagtaagacatattttagtatgcaaaattctatgaagcaggaaccctgtgactttagtcatgggaggttcagattggaaatgtgttgccacaagattattatggattaatagtgattttaggtgttattcttggagttatgggggcattttacaactggtttactctatatgtgcagtctttatacaagaagattcctaaaattgctacctttggaaaactgttgattccatttataatggctggtattcttgggattgttatgcctgatgttctggggagtggacacaatttagttgaagaacttacaagtcatgaatatatttttggaatggttgttttgatttttgttatacgttttatattttcggctgttagttttgggtcaggtgcaccagggggaatattttttccattgcttgttttaggagcatttataggtggaatatttggtatggtaggtgttaaagtttttggaatgaatcccgattatgtaaataactttgtgcttttggctatggcaggatattttacagctattgtgcgtgcccctttgactggtatcatattaatttttgaaatgacaggttctgttagtcaaatgctttcactatcagtaatttcaattgtggcatatattgtggctacacttatgaagtctaaacctatttatgaaagtcttcttgagaggttacttgaaaaaaatggagaacctgtacataaagagaggggcgaaaagatactagaccagttctctgttatgtttggctctcctgttgcgaacaaggcaattcaggatgtacagtggcctgaaaattgtcttttggtagcaattcaaagaggtggagaagaaattattcctagaggtaagacaattcttagaccaagtgatgtaattgtgactatgacagatgagagagatagtggtgctgtgtatgataagatggaaaatttgtgtaaagaacatacgtcacatattttttagggataatgatgaatgtttaataatgatagaatatttaatgaagatttgattaaaaaattggtaatttgaaagagagttaaggaattaatagaaaatgaaaatgtgatatcttagatgtaaaagagtttgaagaaaataattgtatatatttgttaatgagattatatggactaatggtatatttatactgtgctaaaagttgcactattgtatgaggaatgggaataaagggtttgaaaaaataggtagaagatttttcagatattcttattgggatattttaattaatatattttaattgcgatattttgggaagaatagaatttatttataaatgaaaataattaaaaggggttaaggttgtattagccccttttgcttatagagtttggaaatggtatcttgatagcagttgttttatgcttattatattttattacatattttaaaattaaccttatcactcctaaatcattattctatcaacttttaaaacactttcaagacaatcacctattgaaaacaaagttaattaaaaacctacatatcagtttagtattcgtgtagatgattatataaatataaaagtataagaaaggtgagtatctgtggttagttcatttttaaatgatatctttagaacaattttagtaagttgtatttttatagttattttattagtctttagaataactttatttaagactttcagtaaaaaatttaattactatatatggcttattgtgattattaagctatcattaccatttatgaattatacttttatatttaatgagtcaaaatataatggtaatattaataagataagtttaggcaattttaatagtatttctattgtatatagtactgttttagtctctgtttggattgctattacgatattttatttagtttatactttattgaaatatattaagcttaaaaatatgataaatgatttgtcttatgatgttgaggatgataagataaaaaatctttatgaaaatttattaaaagagcttaagataaataaaaaaatacggcttaaatattcatatgaagttgaaagtccagtattttttaattcgtgtgtcattttaccaccatgtgattatacattaaaagagttaaactggatatttaggcatgagttgatgcattttaagagtaaagacctttacattaagtatttggtgatatttttaaaatgtgtttattggtttaatccttttgtgtatataatggagaagtttatagatttggattgtgaattttattgtgatgaaagagttttgaagaattgtacgatagaagagaagcaggattatgcattgacaataattagtgcaatgagaaaaggttcaaatagttcaaataaatttgtggctggattacataaggagtcagatattaaaaaaagagtgtttagtatgtttaatgaaaagtacagaaatggtattttgatagcagttattttatgtttattatcttctattacatattttgaaattgatttaattactactaaatcaatattttatccactttcaaaacaaacacctattgaaaatagaactaattcaaaacctacatatcagattaatgtttatatagataattaaaaaatacaaagtttaacaagagattaatataaataattttaataagtatctttcacatatgttaaatttactttaattatattaaagccaatgaattattctttagaagctccaatgccagtaaatacaggtaaagaaaaatcttttactacaattgtaaattaaaaaatattctaatatttaaagaaatgcaaaagtgtaagaagggtaaaaatctgttataatacattaaaaactaaatttagaaaaatttacataattagaaaaatgatttgataaaaaataaagttaaatattaactaagtaaatttgaaaaagaaaaaatataaagtacaaatttaaaaggaggtaactaatgaaaaagaagttggaagatatgactttagaggagttatggaacttgtttcctatatttttgactactcacaaagaatgttggaaaaattggtttaaagaagaacaatatagactaactggaatattgccaatgcaaaaaattgttagaataagtcatattggaagtacttctgtgagtacgatttatgccaagtccattgttgacatactgattgagataattcctgattataatatgaaagatattaaagatttgattgagtcgaatggatatatttgtatgtctgagagcagtagtaggctttcacttaataaagggtatacagtagatgggtttgaagaacgcgtttttcatttgcatataaggtatgtaggtgataatgatgagttgttttttagagattacttaattgaccacccagatgttgcaaaggagtatgaaaaacttaagttggacctttggaagaagtatgagcataatcgtgatgcttatacagatagtaaactagattttgttagggagtttactgaaaaggcaaaggtgttgtattctaatagatataattagaaataggtacaattagatatttatcttatatatcgtattatattttttaagaaagtaattaatagaaaaaggggttgtttcaaaatggagagataaatccctttttcattgttgaaatgataaaaatatatttgatttcatgtaaaaaagagtgcctcatcaactaaaaagtttattttgagacacacacatttttattaaggtaaataaaaatatcacatttgattaaattttaagttaatgaatatatgtgtaaatatttaattataagttattataattttacatagtataaaacaatctaatttgtattatataagataatctaattttagactaaaataatctaatataaagaaatagagaaaattcattctcagtataagagatatccaattttccattgtacttattaacaatttctctaatattctcaataccatatccgtgagaattactatcttttttatctgaaataaatagttcttgttttctattgataggatttaccttgttgtttgtcaataaatagctaaaatactccttctcacaacgtgcctttaataccacttttctatttgacaaatcaggaattttcaaagatgcttctatagcgttatctaaagaatttgaaaaaatagtacataaatctataggttctatacccaagtgattgtctatatctatattaaagtgcacatcaacaccattttcttccaaacttgtatgacgaagatttaaaattgagttaagagcttggtttttgcaaaattgtttgccactaagagtacctatacctatttttaactgattaaaatactttttagctccagcaatatcttcaatttctaaatacgattcaatcatttgaaagtgattattcatatcatgtcgcattttgcgtatttgaatttgttgattttctagtaagttatagtatttttcttttaggtgatttgcttgtttttctatcttcatctttacattttcaatcaatggctgtaaaagaagtatcacaccgatatttgccagaattgctgacaagatgattagataagtgccataaggtaagttgcctaagataatattcttattactacccatagggattaaattagtaggtggcagaataatagcaattaatattgataaaaatgaagatatacataccatatcaataaaaatccatattttatttgataagtattgttttatattgaccaatctattctttaggaaaatatgtattaaaaaccaaaataataatttaattagagcagaaattatctggactattgaaagtattaaaatatattcttttgagtgtataagttcctcatatatagggttgtttataaaaagaaaattaagcccaattataataggataaagtatcatgacaactgatattataggaattaatttgcttttgctacatattataagtagtataaaatatccgaatagtgtaaacaaaatatttacggggtcggaaagccatattatcatttgactaataatagagtagcccaaaatcaatatgattttgaaaatccaatgattcctaaagtctataaaataggaagtcaacttataaagaaaaaaggctatgaaaatattgattaatattagaataaaatttatgcttgtagagattaaagaataagtgtccatttaatatacctttctattaattaagattctggaaactaagttttaaaaaattaaatcttaaaaattaaaattctggaaattagatttcaaagaattgattttgaaaaataaaattctagaaattaagcttcaaaaaattgagttttgaaagattgaaattttaaaaattaagtttcaaaaaattaaatttgaaacaaaactctaaaaactaagcttcaaaaaattaaattttgaaagattgaaattctagaaactaagctttaaaaaattaagtttcaaaaaaactctaaaaactaagcttcaaaaaattaaattttgaaagattgaaattctagaaattaagcttcaaaaaattaaatttgaaaaaacaaaactctaaaaactgagctttaaaaaattaagtttcaaaaataaaattctagagattgaacttcaaaaattaaggttctaacatataccttgtaaattttcctacaacctcttgatattttttacggcttataggaattttttcattctgaactttggcataagtttgagttatactatctacatggtttagattgacaatatacctttgatgcgtacgtataaaattagagggaagaacagtttccatatcatttaattttccgtagtattctaatgttttatcaaaggtaactacagttaattttcttagctcgcttttaaagtagaggatatcttttgtattaattttacaaagattagttccaatatgaactgtaataaagttttctttccattgttctaatttttttagtgcttcttttaatactttacatattttttcagttttataaggttttaagatgtagttcaaagctcctacatcatacccatgaaatacatagtcagaaaaacctgtgacaaagatgattatagtatcttttgaatgttttcgtatagtttttgctatgtcaacgccattacttttttcaagttcaatatctaaaaaaataatatctatgtaataattttcgtgttctagattgtatactagactttctccatttgaatattcttttatttggtaggggtagccccacaaatccatttctcttgtaatgattttattcagcatgtttctttgttgtttttcatcatcacaaatacaaatcgaagtcaattttttatctcctttcaagttttatatttatatagttaagtatataatatattttgctacctagatatataaaatgaaataacaattatatccagatagcaaaataaaattttttatattagtatacttacacttaaaactattctattaaacttattctgaagtgctaatgattttcttattaaaaaatctaataacctttcttattataaaataccaatgcttttattattataaaaatgtaatgacttttcatattataaaaagcaaatgattatcttactataaaaatacaatgacttttaatactataaaaagcaaataattatcttactataaaaatgcaatgacttttaatactataaaaagcaaataattatcttactataaaaatacaatgacttttcatattataaaaagcaaataattatcttactataaaaatataatggattttcatattataaaaagcaaataattatcttactataaaaatacaatgacttttcatatcataaaaatctaataaccttttttaatttaaaatgctaatgcttttcttattataaaaagtaatgattttattactttaaaaatctaacaaccttccttattataaaataccaataatttttttgaatttcttataagttaatagatatataaggtacatataaactccacaaatccctataaaacctaagtttatcaaaagagcattgacctcactattgacgattctaccatcattatttaacataatcataaaattaaacagataaattaaaaaacttcctgcaataagagggtatgaaaatactttctttaattgatttctaatacagaactttatataatcattgtttgctcctaatcgatttaaatccataaagacctgcttgtgatttatagctatagtaacaccccttgtatatgcaatgattcctactgctgtaaaacatatgattgccacatatatgaataacattaagaagactgccatgttttttatcatatcttggctttgtaaaattttaaagttaggatagtatttccaattaagatacaactgattgttgtttgggtctagttttaaatgaccttcaccacttggatattcttcatccataaaatattttcttccagttgattcataacgtttttttacgtattcatcataaccactgaacatgcccatttccttagatgttctttttataatttctttctttaagtcattggcaaaagcataggtatctttatctacattaaatagtatagaattattgtaattttttatggataaatctttagtaaatgatttataatcctcatcattaaggacataggcgttcatacttctattttgaaaaaaagaaccattaaatattatttttccagcatatctaaaggggatttctttttctgtgactgggcttgatataaatttggtatatttataatcttgattttcatttcctttatttacaacagcaagatattcaccattttttatagttattggtttgtcaattagcttggaaaaatctttagaattaaagaacatatcataggagctttttttcatatataccctttcgatagttccatctttatgatatattgattctacaccatcaacaattaattctatagaaggaatttccatatagttttgaatttttatattgtgtttatctgctaattgttcaatatctttttttgatacctgtttatctctttgattgtaggtaaaagtataatctatagggttatttttaagagtatcatagatacctgcaaccatattaggaacatagaatacagcaaataatgctcctgcaatcaaaaatgaaataacacacatgttttttactgtttgtcttcccataaatctcatcatgctagttgatatgatgtttttatagtatttttctggatgttttcctcttttagcatgtacaactatgtatgtcataatcatatatattccaataagagagagtagataagtaaagctccatacagatggtagtctataatttaatttgtttatagttagtgaaggtacgatatatcctagaaaaatacctagtataataaaaattatacctaatataccataccagtcctttacatcctgtattggttcagatattctctggtcatttaatatatcaattatatttgtacgattaataaattttacagaaagtataaatatgcataatgtcacaaatacactaaatataaatccatatatgaatccttgagttccaaaatgatatgtcatttctctggtatcaataatcactaattgaaatattttccatataccaaaagatacaggaatacttaatataagacctaaaaaacagcatactattgaaattaacaatatctctgaaaatagaagtttttttaatttcttcttatctgttcctagagccatgaaaataccaatttccttgcttttaaattttaaaaagagggaagaagcgtatgtagtaaagacagcgcatcctaatatagcaactgagaatatcattgtagcctgttttctgctatctccaccagttggaagtatgttttgtattgttgggctaaaataaattagagcatatgaagttactaataccacagaaagtattatacaaaagaataaagttgtatagttcttccaattataggctcgaagtttgctgtataatttattaattgtcatcttgagcgcctcccatttcttttaaaacttctagtaattcatctaggaatttatgtcttgaatttgattttacaacttctttataaattattccatctttaagcacaataactcggtcgcagaagcttgctgcaaagctatcgtgtgtaaccatgagtatagtagcatctaattcttgctttgcttttaaaaatgattcaatgactgtacgacaagacttactatcaaggttaccagttggttcatctgctaatattaaatctgggttgttcatgagtgctcttgctactgctgtacgctgtttttctccaccagatatttcggcagggtatttttttctgatatgttcaataccaaatagctcgcatagattaattgcacggttttccatttgtaagacttgactacctttgataatttgtggaacacatatattttcaaagacactaagaccatcaaatagcatgaaatcttggaatacaaatcctagttgttggtttctaacttctgaaagttccttttcttttaaatttcttatattattatttccaagaattatttccccattatcaattgggataaaacatgaaatacaatttaaaagagtagtttttccacttcctgatgaacccatgattgcgacaaactctcctttgttgatttcaaaagaaatattttttaatacaggatatgttttattgcctgttttatatgatttacataattggtttactttaagcatatatatcatcctcactttcatttatcttgtaagtcaatgatagcatttgaaaggggaggagggatatgagcaatattgtaatagttggatgtttttttgtaatgtttgaaaatatattgtttggatagtgtgagaggttattattatagttaaattgattatattattggaggatttagagggttatttttaggtattaattgttgtgctaaagtaatatgatgtggaacattgaaggtgtagttagaaaaaaggtatatagtaaaagtaaaaaggttatagaataacgaatgttgtattgaaaaaaatgatgtaaataatgtatagtagggttaaaaagaaaaaaagaattatagagcagtaagattatttaatggaatgtattgtaaataatttgaaaggatttaggggttattaacacaatgtaattgagaaaatatattggagttttggaaataaataggtcgttaaaaacaattgaaatgtataataaaaaggttaaaaagtattattagtataggtatgatagataattttagaaagtggaagtattttagactatgctgaaaagtgattgatatgattttgagatattaaaatattactatattatagtaaagacgttaaaataataaaatgttgtaataataaaggtttgtagtataataaagaactgtaataaataagactttgcaatgtaatagaaatgctgtaataataaaagtctgtagtataataaagaactgtaataaataagagattgtaatataatagaaatgttgtaataataaaagtctgtagtataataaagaactgtaataaataagactttgcaatgtaatagaaatgttgcaataataaaggtctgtagtatagcaaagaactgtaataaataagagattgtaatagaaatgctgtaataataaaagtctgtagtataacaaagaactgtaataaataagactttataatataatagaaatgttgcaataacaaaacaccataataaataagagtttgcaatataatagaaatactgtaataacaaaacactgcaataaataagagattgtaatataataaaagtctgtaatataacaaaatcctataataaataagattttacaatataataaaaatcctataataaataggactctgtaatataataaaatgctgtaataacaaaacactataataaataagaccctgtaatataataaaaatactataatatagtaaaaatcatgcaataataaaaatctataataataaaccccagcataacaaagacattaatttcttactaaaaaggccaccacaattaacagtgaaaaagcaattgaaagtattgaaaaagtaaagtgagaattagagtcattattacgattattaagttttatccataaaccacatataattgtacacaacaataaaattgctgatattactcctataaatgtaaaaaacattaaaattcctcccccttatttaatgcaagtatttttagtcaatgagaatattttcaaacgttaccataaaataaaaaaatgtacataaaaaattaatatagtattattttgtaatatctaccaataataaatctaattgaaaatctattaaaccatttctctgttcaacattaagaatatcaataccactatacttgaaaaaagcattagaacgaagaaaaagcaactgaataaatgaagttatttgatacgcaatagttctgtattcagcttcagtttttttgttattctgattttcatagtgagccttaattaaaggtagtatctcaaatggataaacaatttcttcttgtatcaatatatagggtacagaaatctttataaattggctatgttcacctataaaatcaaaaaatgcaattagtatttcccttaattgctgtttaggtgctaaatttttagtatcatgtgtagccttatattcatccatatgacgctttaaaaattttttaatagaaatattaattaactcctctttagatttaaaataataattaatcatagctaaattgacatttgctttagctacaatttctctagccgtaatgcttgaaacatctctatgtgaagatagtaactggattgtggcattaattaattgttcctttgttgaatctgctttcataatttttccccttaaaagtttctccataaaaaaattaaacatgtttaatacacgtttagatactatcatgaaaattttgggatgtcaatgggtgattagtacttaagtatttaagtactaatcgattagacttttataagggggatttgaatttctgtaagataattttcaggatttatttcattatgctcacccttatgaccgatttgtctatttatacctgatatttgataatcactatttttatctaaccaataacagaacgattcatatgcaccagctatattttcatatggaccataaaccatagtacatgccatcatatcaatttcttctgtctcacgatatataaatccagatttgttctttccaatcttctttacaaccattccaacttcaatatctacaccattatctttgacttcttcatcatggtaaaaagctatattattgttgggttgacgtgatacttctatatgttcttctttaataaatttagataacttttcccagagtataccttcagattggtagtctgggactacctctctaagtgatatgattttataacttggaatctttttaaagacaacattgtaatgaatttcatctttatcacagtttatagcttctataaatttatcaattttatttattctttgttgttcgtgctttatttccttttgtatttcattcttttttctattcaattctttaattacaaattcatcattccaattatgtacgatatttgctatttctgcaacgctaaattttgaatctctcaataatacaattctttgtaatattgaaatctgttcaactgagtataatctatgacctgtatatttgtctatttctgcaggctttaaaataccaagttcatcataataacgcaacatacgaatagaaatttgtgttagttttgaaacctctcctattttaaacatgaaaatatgacctccttttcacttataattagtatatattttgtttttatatacttcaagcgattgtggaaatacaattattttccagatgttgcaataaattatagagagtaaattatatttaagtagtaatcgtatcaaatcatagattatcttaatttataattcatattaaaattaccagtctaactcaaattcaaaatcatccgactttatctgttcaatttcagaatttaccttctgtttaaatttattagaagaaatcatatatacaagaaatattaaaccaaatattatttgtacatattgagctattacacataatttaatagggtagtgtagaagtaattgaatgttgaaaaaatagtacatcatatgaactaacccagctgataaaatgcttctacttgtattgatatatacaaaattaattataaagtttaaaagtacaatgtttggtataaataaaaaagcatcaaatagggagtattgtgccaaattatatggtatttgattaggtgtaaaatacgaccctagataccagattccacaaacaagccctaaaataattgaagagcctataaatccaaatctaactaataatttgtcaatggcgtatcctctccatccagcttcttgactaagtatactcaatataaaacttgctaatagcatataagctattttagaaggtctaaacactgctatgtgtatccaatctatatcagaagtttttacattaaagtaatttccgattattaacgaagtaataaaagttaaagcaaaaaataatattgttaatagtatccattttattctaatttctttaaagcttaggtatctataaataaaatcttgttttgcactttgtggatagattgtagaaataaaaaatagacctacaatagctggtgatgtatatgcaagataaaaaatgatttctccaagtattgtatttgtaattccgagcaacgcaggtgtaagactgaatatccagttcaatactagcgtagatgtaaagaaatagattaagtgtttgtttgtattaaagggggtgttatatagttgcattttttcactatccttccgttttataatgaagttttaatttttattaattgtttatttatttttatatgtattaagttatcgtttgatgttagttattgcctataataatatcctattttttatattttgattaattatttttacactaaatataattaattagtatttaatattgaacatattatattattattaattattaaataggtcaataaatttgcaattagtgatattaataaattactttagatttttattaaatgtttagcttttctttaatattttttatataacgacgatttataataactttttcgttgttttttaaagtagcttgcatgcgattatgtgatattacttttatactttttatgtagtccatatttaaaatcatggatttagatattcgtgagaaggatgtattagctaataattttgataatttatatatttttaaatcaatttcaaatacatcatcttcataataagcaaatgttttatttccaactgtttcaaagtataaaatatcacagacattgagtttataaatctctcctgattttttaccttttatatcaagtaatggtgtactcaataatgaaattattttttcaatgttattatctagagcagaacattttatggttatttcaatatcatcacaattaataccttgttcgacatgtattttcattaatcatcacctcattttattactgtcattagaatagcattatatcttattgagtccaactagatgcgttctaaatttcaaattaagcatagtgaaattcaaaaataaaatagtgaaattcaaatttgaggtggtaaaattcaaaaaaatactatggatatttggataaattatccaaatatcctagtatttagcatagaatatgtctaattattttacaaatagacctattttatgacttacatatattgtcaaattacttcttaaatatcaaaatatttttggataatgtatcaatactgtttgataaagtatttaatttaccctcaattctaaccaacaagtacatggatagagctataggaaaaccaacattggttattaacagttgtaaactatcatccataaaattagccccctattctataactaagtcataaggagtggtatttgtttccacaaccttggcttcaacaacagaagctaggtcaaatcctccaaccgaaaaaatatttttagatactatcaaatccatgacagattttatattttcttcagttaaatcatcctttggattttctatagaaaaagaaacttgtttatcctttacatttttaaagctcatgactaattttttcttaatttccatataattacctccgatataataatttatattttaattgtttgcttgttaatattggtattttaattgtcaatattagtgttttgcttgttagtattaatatttcaattgtcaatattaatgttttacttgttagtattagtatttcaattgtcaatattagtgttttgcttgttagtattaatatttcaattgtcaatattagtgttttgcttgttagtattaatatttcaattgtcaatattagtgttttgcttgttagtattagtatttcaattgtcaatattagtgttttgcttgttagtattagtatttcaattgtcaatattagtgttttgtttgttagtatcagtgtttcaattgtcaatattagtgttttgtttgttagtatcagtgtttcaattgtcaatattagtattttaattgttgactctagttattgctgatatagaaaatatttaatttatttcaattaattagattaaagtagggtagcatttaaaatagctaacatgtttaagttgaaatacgtttaatatattaatttttcaaagcattaatatattaaagttataaccaaaattgaagttataatctgccaaatctatagcgtattaagtgcgttatataacttaatcttttatataaagagttaatttttttaatttgtaaagcagagtacgtttaaaagatactatttagataatgatgtactatctaattttaaaatatctacaatagggttctcttgaagacttgctattgcttctgcaacagcataaacatcttcatttaatgcctctgcttttacatttgcaaatgatttacttttaacaactgccttacccttatcatcaaaaccagcatccaattttagttttatactagataaattttttgttgaaacaacttccataaaattacctcctaaaaatttaatttcaaagatttgtcgactttctttgttagctataatactatcatctaagataatatcggagttaaacagtaatttctaaagattttttgtgtaaatttttataggaaaaattttacttttctgatgatgaaaaagtttacaagttatttttgaagatatgttcttagtgttttgaaatagtatttgtatatattcatgcttagttgagatagttttgtatggattttcatatgtgtagagttaaatgttaggtaccaaagtttatgttaaattaaatgttaaagcttatgttaaaaattttattaaatttaatctgtaaataaaaaagttaaaagtccaatattaacattttacttttaaaccattaaaatctttattaaagctaacaaagttataagttatgagaaattttattaaagttaatacaaaaattaattttaaagctaagaaattttttattagattcaataaaactaataaatatagtttagtcaataatgtattaaataaaaactttgttaagtctataaaaatatcttaaaggaggtgtaacttatgaagataaaagtggaggatataccagttcaatttcatgcaatggtagaaataatcggaattgataagttcatagaggttgccaagttgtatggaggaacaaatacttatatacctacgtataaggggctttttagatatgctagaaatagggatatagtaaaacaatttaatggagtcaaccataatgaattggctattagatataatatgtgtgtaagcaatattaagcgaatactcaatgaaaataatgtttaaacataatgaaaatagccttgttaaatgtaagagtaaagacaaagaagatgttttataaagtttttttagacaaattaactaaatttactacttattaatttaaatacattgtatattctataaaaaaatttgttaaatactggagatatattgagaatacaaagaaaatggtcgaaaatatttgttggctaaaaaatagataaaatgatacaattgcttgtataaaggggaaaaataaataaataaactatataaataaagaaatagcaattaatatgacataatatatttataaaattaagaatataaatagatattttaagggattagttgttaaattaggaaatattaaaaaaatatatatatttatatttaaactattttgttatttatataaaaatacttatctagttactagcaattattagtagaaatgggggaaatagagatgaataagggattttacaaattaaattcagtggtattgaactttgatattaagaatgatgttaacaagataagatttaatcattatataatgagaaaagaaaacatacaaagacttcaaggaactctgccaaacggacaattttatatgacagtgagaagagctgctacagatttacaactttctatttctactataagtaggcttgtaaaagagtttttggatttagggataataagattagtgtctaagggtgtaaaaggtaatcgttctgtatatagttacgtaagtatagagtttaatggaagtttatttgatgatagcaaatatatggaacttgactgtgtatgtaatgatgaatttattgataatagtggcatagagtttgattgtgatagcaaagataattcttttaatggagatataaatgtagaaactgtgcattgcattaatgagtatttctctgatgatgatgtagagcataattataacaatttccataataaagatactataaaggataaagccatttctaatattagcactatcaaaaaatatattgatgaatcttttgatacaaataaatcagaaaattctaacttacaacaggagtcaataaatttcaactttaatgatacatgcaatgaaatagataaaagaacgaataatagtatagaaaataatcaaaataaaaggcctatgagattgagtgacatcagtgttttaagtgataaaggtatgacaaataaaaagaattactttaatcataatcatggtatacaaaaaaggaataaatctgcaacaaagaaaaaagaatccttaaataaatttaataaaaaaaatatacagcaaagcattataaatatgctaaataaaaaatcaggtaagaattttaaaatcgattctccaataagcataaaacttatcaatgaaaggctaaaggagggctatgtcttagaagatttctataaagttattgaggtaaaagtggctaagtggaaaaataccataatggaaatgtatataagaccagaaaccttgtttagctataagtttgaatcctatgtaaatgaaaacatatctatgaaaagtcaaagtaatgttcatccatgtaaagaaggcaatagtaatgatagcagtaattatatacattctgattatacaacatatgatggcagtgtgcgtgagagaaaaaaatatgagaatgtaagatactggaatcctatatgtgaaatttaattagtttaagaatgtatttatgataaataagatattaatagagaatagtgagctatagcaaatgatatatcaatagttggtagtaagttatattaagcaagatattactatcaggtagtgaattatagtgaacgatatatcaataattggtagtaagttatatcaaataagatattactatcgagtaatgaattatagtgaacgatatattaataattggcagtaagttatatcaaataagatattactatcgagtaatgaattatagtgaacgatatattaataattggcagtaagttatatcaaataagatattactatcgagtaatgaattatagtgaacgatatattaataattggcagtaagttatattaagtaagatattactatcaggtagtgaattatattgaacgatatatcaataattggcagtaagttatatcaaataagatattactatcgagtaatgaattatattgaacaatgtattaataattggtagtaagttatatcaaataagatattgctattatgtagtaaattatatgtatcagaataaatagtatattaataatttgtagtatatcatgacgaataatatagtcataacaaatagtgagtcataacaaataatgtatttataattgataatgtatttaaaaatcaaaatataaaaacttataaggaaagagagattaatttatatgggtaaatcaaaagatgttgaaatagagaagtctattttaggcacaattcttttagacaataaattaagctataagctagatgaattaaatgaaaacatgtttatgaatgatatatgtcttgagatatttaaaattatgaaagaacttaaaaaagaaaacatagtgattgatgtggccactgtgaaatcaaagatagatagaaaatctctagcaataaaaacgagtgatgtgactaatctaattacttggggtcagaattttggtcttgatggtcatattaaaattttaaaagaaaatttagctagaagaagcataaatcaaaactgccaaaaccttttacacagcctaaaccttggagaaaatatcgatacttgtatttacaaatttgaaagtaatataaaggagattttggacaaggatacttatgaaaatgatgatgtaaatagtatagcagggaaggtgcttgattttttagaaaacaaaaaagatattggatttaaatttggtataaaattacttgatactactataggaggtctttttaaaggagagctaaccacaatagcagctaaatcgggggttgggaaaactgctttggcacttcaaataatgttaaattcatttaagcaaggtaaaaaaactttatttataagtagagaaatgaccagtgagcaagtatttatgagaaatatatgcagagtaactggtgtaagtacaaggaatatgaaatctaaagaaatagatgaaaatgattggaaacttattgtaaatgctataggtgatttaagcgaaaataacttaatttatattaatgataagatagatacaattagtgcaattagaaagaggataaggcaggtaaagccagatttattaatagtggattatgtgcaactccttacatctcagaaaagcatggataagagagaaagggaggtagctactttttcgagagaacttaaaaatatgactttagattttaatatacctgtaatccaattaagtcagttaaatgatgaaatgaaagattcaagaccttatggagatagacctatgagggatagcaaagccatctaccacgatagcaacaatgtggtttatatacatcaattaaaggggagtgattatgaagaagcagtgagagatattggagaaagtgaggaggcagttagagcatcagaatacaggggaattaagatggttgatttaatagttgcgaagtgtagagatggacagactaggcataagcatttttgttactttggggataagttacattttcaagaactaaattattaggtcaataaagtagtaataacaagcttattaaaagtcaggaaatagcaaatagattataaaatatgaggtgaaaatatgttggaattaacgaaaattatagaattacttgaagaacacaagatagaagtaagtattccaaaggagttacataagtatagtttattggaataccttgaattgtgtcaacaaagtgggggaacatatttttatattaaaacactggaaggggcattaaaagaggctagaaatgagcttatgattaaattgtttaatgggaaaaattatatggaattagcgaggatgtttgaaatgagtgttattaatgtcaggcatattgttagaaaaaaatagatatttttggagaatacaagtgtgatatacttctgaaatagaagttattatagttgaaataaaattgtggctaatttgtgtataagtttaagattatagaggagtataagtgtgattaacagcatgattttgtgaataaaattgatgatatatatgagttaaatgtgtgattaataaggtaaggttgtgtataagattatgagtatttaaaaggaggggctataattaatagtgtagagttgtatgtttgcttaagattatataataatttaatagattaaactatacgaataaggtaaaatcgtgtgtttagttaaagcttattataaaatcttgatatgcgattaatgatgtaatatgtgaataaagttaagattataatagatttaacctgtggctaatagaataaaattgtgaataaagttaagattataataggtttaacctgtgattaatagagtaagagtgtaaatagagataaacttcaatgtgggtttaacttgtggttaatagagtaaggtgtaactaaagataaacttcaatatgggtttaacttgtgattaatagagtaaggtgcaactaaagataaacttcaatatgagcttaacctatgattgatagagtaagaatgtaaatagagataaacttcaatatgggcttaacttgtggttaatagagtaagagtgtaaatagagataaacttcaatatgggtttaacttgtggttaatagagtaagaatgtaaatagagataaacttcaatatgagcttaacttgtgattaatagagtaagagtgtaaatagagataaacttcaatatgagtttaacttgtggttaatagagtaagagtgtaaatagagataaacttcaatatgagcttaacttgtgattaatagagtaagagtgtaaatagagataaacttcaatatgggcttaacttgtgattaatagagtaagagtgtaactaaagataaacttcaatatgagtttaacttgtggctaatagaataagattgtgaataaagttatagttttagatgggtattaacctgttactaatagaatatgattaggtgtaaaattatagagctgtataagaaaatattatagatatattaaatattagataataaatatttatatagatacacaaaagaaaaggcgatatgaagctaaacttaatgacttcatatcgttttttatttgaaactcctttgtatttagagtgtgatttttaatattgaggttttatgtgattaagtcacagataaaaagtaagtatcttgatataattcttatagattaataatatagggaggttattatgtctaataaaaaaaagaagtatgcaaatattttagcaaatgagtgcgttgcttgtggtagctgtataaaagcatgtccaagaagtgctatctcagttccatgtggcattagtgcaaaaattaatagagatttatgtgttggatgtgggatttgtgaaaagatatgtccagcatctgtaattgagattataacaatattaaaagaggaagaaggtaagtgtcatgaataataaaaaacattggtatgactatttatggattttttcttcaatatatttggtattgggatttgtaaatattattttcgcttggattgggctaatttgtttctttgttccactagctatttctattgttaagggaaataaagcttactgtaataagtattgtggaagagggcaactgtttaatttgcttggaaataaattgaagctgtcaagaaatagagatattcctaaatttattagaagtaagtggtttagatatgggtttttgacattttttatggtaatgtttgccaatatgcttttttcaacttatttagtgtttgaaggaagtagaaattttaaagaagtagtgactttgttgtggactataaaaatgccttggcaatgggcgtatcatggaactttagtttcaccttgggtggtacagtttgcatttggtttttatagtgttatgcttacatcaactgttcttggtttgattactatgatattgtttaaacctcgttcatggtgtgtttattgccctatgggtactatgactcagatgatatgtaaggcaaagagtaagtctgtataggaagagattttgtgaagatttaaggggtttaatgtttaaagctagagttgatttaagaaaataagaaagatataaatatctaaatatgaaatagattcaagatgagtaatagtttctattagctatgataggtatatgagtggagcataaatgaagtttgtataaagtaaactcatttatgcttcttttttacatgatacattactaattaaatagaaaaacaatgtaacaacttgtattttaagtacgtcagagaaatctgaagaaatgataaatgttatagaagattgtaaacttatgcttaaaacaagtaatagatatttaaaggaagcagattaaatttcaagaagtcttacgtgcttgttgaaacataaactggatttgttacagataaactaatttatacaatattttttaattaatatgttttcattactatatattatatgttaatacataaaaaaatggtggctgttttattaaaggtaggtcaatgacatttcttataaaaataaattctaactttaaattaacttaggagttctgtataataattatatgttgaaaatattatgaagttttgcttatacaataaataattgattttatttctggtaaaggtgatagaaaaataaatattcagattatatagtaaatttaactatatatattaaactataaaaaggagattttatatgatgaaacgagatatttactcagtacagttagattatatgttagcataatgtactgagtaaaataataatttgctaacaaatagaactgtactgctaaaaactttaggttttgttaacttgaaatgattaataatcacactaaatttaaacaaataaagaaacattttatctataaaattattttaagttaataaagtaaaataaataaggataggtgtacagttatgaaatatttaatagaaatagcaaaaaaagagaggttattagtttttatatatttagcactaggtataggaatagaacttttaaatagttttagtgctaattattatcagagcctaatagatagatttaataacagtactataaattttcacataatttttatctatggaactgtattagttactttatgtcttttaagatatattgatgaatatccaggtagaagactagaacatagtttttttttagatttgaaattaaaggctttagaaaaaatgagtaaaatagattacttagaatatcagatgttaggcactggaaaattaattcaaaaaattgaaaatggagctaatgctggcagaaatatattttttaattttttattagccgttgttagaaaaataattccatcaattttatttagtatggtttttatttatagaattgataaaaaagttatgtttaccatattaattggatattttatagtttttattattactaatttactaataaaagctctatatcaaatcaaagagcatatattaattaatgaagagaagatgaatcattttttagttcgtggatttgtagaaatggttgtatttcgggtaaacaaaagatttgagtatgaaatttgtcagtcaaaatttgcgaaaaaagaaattattgattctagggttaaaatgacactgattcatgaagctttcttcacgattttttcattaatagtgacgttcataaaaatgttaataatagtttatagttggaaaactaaaacaataagtataggttctataattgcattgataactttactagataatgcatatactcctatagctatttttaatgtattgtatattcaatttaaactagataaagcagcatataaacgctatacagatattttggaacttaataatgatggtcaactgttagcaggtaaagaagttaatttaatgtatggaaatattgaatttaatgagattagcttcttgtataataataagcgagagatatttaataaacttagtttaagtattaaaagtggagaaaaagtagctattgttggagagagtggttctggtaaatcaactttaattaaactattaattggattattaaagcccagcgaaggaactatatttatagatgattataatctacttgagatgaatctaaatagttactataattatgttacatatgtgtcacaggattcacctatatttgatggaactttacgtgagaatattgtatttggaaaaactataaaaagtaatgatattattgaagtcttagaaaaagtaggtttaaaaaatttatacttaaaattagaagctggtttagatactaaattaggtgaaaaaggaactacattatcaggtggagaaaagcagaggctagcattagcaaggctttggttttcagatgctaagataattatattagatgaagctacatcagctttagacaatattacagaggaaaaagttatgctaaatgttatggaatttttgaaagataaaacaactattatgattgctcacagatttaactcaattaagaatgttgaaaatataattgttcttaaagaggggagtataataggtagtggtagctttaaaaaactattagatggtaatttatattttagagaattatactatacaatgtcataattattatgtaagtataagaaaatatttttcttaatttaatattatttaaatattactggaatattattaaaaatttgagattccagtaatattttttagtattattcttaatatttacattaacatatattcttccatttttattaacttgtatttaaaatgtaatatttttatataaatatgaaaaatatcaagtatttaaattaaataaattcatatccattaattgagggatagatattaaaagattagaatttatgagttattagaaatattctatataaatagcatagaaaaatagttaaactaaattattaaaatataaaaatatacataaaaaataaatgtaaatatcaaataagatactatataaaaatagatataagtatcttttttattattgaaattatgaaaatatatttgatttcacacaaaaaagagtgcctcatgaactaaaaagttcattttgagacacacttttacagtgtcaaagaacgaagtttatccttatccaatacttttataccaccacgagataaagacacaataccttctctagcaaaatatttcaacattctcgatacaacttctctggcactacccatatacttagcaatttgctcatgagtcatatttatagtgctactgccatttttagctatctcatcaattaaaaaagatgccaaacgcttatcaaaactcataaaaagaatttgttgcatagcccacataacatcagaaaaacgttcggtagctaatttatatgaaaataactctgcatgaatattttctgtagataattttgcaaaaacagaggaattaatctgtataatatcgcagtccgtttcagcatctacatagacatcaaaagttattgtttttagaatacaggaagctgataaaatacatacatctccatcatcaagtcggaacagtgtaacctctcgaccttcatctgaaagtatgtatgtacgtattgttccagactttataatcaaaataccaatacagtcactatcaccacaatgtactggattcccttttttgtaatccgaggtatttgctgaagaaattaataattctttttgtaagtcagtaagtttatcccaaaaaggcaagctatgtgtaagtatatcaatttcattttgtgaaatcatacaatatctcctttcttaaattgttataatcccatgatacaagtgaatagataaattgacaagtagtttgttaagaggattatttagtcagatagtaatagtatgatttatgtagaaaaaatatgataatatatattcttgctattaatgagaaagtaatatgttttgatgatagtaggtttgtataactaatgcataccgtttatttttaaaagattaagttccttatgtaaccttatagacataaaaccagcaattatagcagccatcaaatcagctattggttgtgcatataagataccatttaacccatagaatacaggaataatcaaaattatagggataaaacagacgccttgtctacacatacctaaaaatccaccttcctttgcttttcctagtgctaggaataatgtagaatacactgtatagaatccaaatagcataaatgaaaacccatttgccctaagagctttactaccattttctattaatagaatgtcaccacttgtaaattgtgaaattatagattttgggaaaagcaccaatataagaccaagcactacacaaaatattgtagtccataatatggaagtttttattgctatatgtaatttatcgtagttcttcgaaccaaaattataaccagcaattggttggaaaccttttataaaaccaaatacaacaagactacctaaagatgttattcgtgttacagcacccattccagctatcacagaatcaccatactttgtagcctccatattagttaatgtaatggcaagactagtcaataattgaaatattaatgtaggtatgccaatttttaggatttctgaaaaaatttcttttgaaaaacagcattcgttaattctaaaactaaatatacttttcttgcttaaaatatatcctacataaacaagtgttgaagcaatctgtgagatagctgttgcaatagaagcaccccttacccccagaccaaaagtataaatgaatatcgggtctaaaatcatattaagcaaagcacctaataacatagcacacatagttgttttagcagctccttcacttgtgacaatattagtcatagtgacattgaatatattaaaaatagatgacacgacataaatgctagcataagatattgcataaggcataatactttttgtagctcctaacaattttaaaattggattgagaaaaatcataatcacaataataactaatgtacccactataatactactgtaaatagatgtacttaccacttttcctgctttttcattatcaccatggcctaaaagtctggcaatatatgaagcagctccatttccaaacaataatcctaatcccacaacaagctgacctaatggaaatgcaacggatatagctcccatttgacttgttccaagtccacccacaaagtatgcatcaaccaaattgtataatgcagttatcatcatacctatcatggtaggtaatcccatagataacaatgcttttgagattggggcagaccctaataattcaatttttttgttactttctttcatacttaacactcctcttctattgacattaagtctaaattataatactataaattatagtaagtatggaaaatagtactataatttatagtatttgtcaatagtaagaaaactaaaggagatgatttttatggctacaatagatttaattgtattgggaatagtaaagcaacaacccaagagtgcttatgatattcaaaaggcagtggaatacaggaatatatcacgttgggttaaaataagtacaccatcaatttataaaaaagtaattcaattagaacaaaagggatatattgaaagtaaaactgtgaagaatggaaaaatgccagaaaaagcagtttattcattaactgaattaggtgagacacattttttagatttaatgtttgatacatctagcaaaccaataaatattcttttagattttaatgctgttatagtaaatttaaatagccttacaccagaaaaacagaaattatgtctcaataatattgaagagaatgttcaagagttaaagaaaactattgaggaaaatataattataaagacagaagtaccagagacagcaaaagcagtgttggagcaacagttggtgctagcacaagcattggaaacctggataaattctttaaaagataatatggggaattagaattagagaagctaacttaataatcattaaacaaaaaccagcatatttaataatgagatattagaaaaaatgaaacaaatgatataaactgaaaagtatatttaaaataaagctcacttaattgagggagaatgttaaactttttaagagcaagagcaagagcaagagcaagagcaagagcaagagcaagagcaagagcaagagcaagagcaagagcaagagcaagagcaagagcaagagcaagagcaagagcaagagcaagagcaagagcaagagcaagagcaagagcaagagcaagagcaagagcaagagcaagagcaagagcaagagcaagagcaagagcaagagcaagagcaagagcaagagcaagagcaagagcaagagcaagcagtaaagtataaaattctattactataataaaagatagaactagaagtctttatgaaagtgggaaaagtatttatataaataaatttatatggtttatagtttaacagtaggaaatatcgtatgagtgagaatatcgtattttacataaagatttagcaatatgacacactgttgtcgtgttctgtaggatatgattaataaatcagatatgaaaggagagtgagtaatatgccagaattactaaaaaatatgtataatcgtgagtcactttatgaagttgcagtagctatccaatcagtttacaactcatttaaggtagacgagttcataaaatctacaatggatgagacatggaataacttagaattaaaagccagatgtcgaaagataagtatgagtttaggaatgtatttaccagaagactataaggaagctctttccattcttgaaaaatcagttacaggtttttattttgcttttttctttccagattttgttgaagtttatgggcaggacgaaataaattgggatttatctataagtgcattagaaagaaatactgagtattggtcttcagaatttgctgtaagagcatttatcatcaaggatgaagagcgtatgatggcacagatgcgtaaatggtctaagcataagagcgaacatgtacgaagacttgcaagtgaaggttgtcgtccccagttgccttggggacaagcaatatccaaatttaaaaaagaccctacacctgtactgcctatattggagcaacttaaaacagatacatcaacgtatgtacaaaagagtgttgctaataatctaaatgatatctcaaaaacacatccagatttagtcataagcattgcaaaggattggtacggtaaaaataaatctactaactggattgtaaagcatggttgtagaactctactaaaaaaaggcaatcgtgatgtattagccctttttggatatgatgatactacttctataaatcttcaggactttactttagaaacaacgtctatttctattggagaggatttaactttttcatttaatattttagcaaaaaaagcgacaaaaacaaggctcgagtacggaattgattatatgaaatctaatggaaaaaggaataggaagatatttaaaatatcggaggtttcattaaaagaaaatgagaaaaagtcatatatgaaaaaacattcatttgcagatgtaagtgtaaggagacattatccaggtatccactcgattactattattattaatggggtagaaaaaggcaaacttgattttgaattaggtgtataattttactaacagcataacctatatcagatactttgctaaacctatatcgtatactctaataaatctatattaggtagtttactacttgtttactgaatttaaatacaaagaaatacaggtgttaatccctgcccattaaaggaatatgagcataacacaaaagtagaacttatcaattctgttacgggtatagtagtaaatccatagaatcacaattagaagatgaagtgtaaaaaataagttagtgttgattttagttgctagtgatattgaatagttatacaatagccatataaattagaatttgtagaggagaaatgtaaatggatgtatatagtttttggaatgacactttggcacaagatgctgttaagataagaaaatattttcatgaagatgcttatattaattggcatgatacaaatgagcattttactttagaagaatttattattgcaaattgtgagtatcctgataaatggaatggtaaagtagaaagggtgctagaatttggaaatttagtaattacagtgacacatgtttatgcaataaataaaccactatcatttcatgtcgtttcatttatcagccttaaagatgataagattatttctattgatgaatattggggagaggatgatgatgtgccacagtggagattagataaacatattggaaagccaataaaatagtgtttgttctgttttataactgaaattttgataacatttgatattttgatttgtcattggtcaacatagtcgttagtgtaataatttaaaaaagtagaatttggagagtgagcactatggaagaaaaatacatcttatctgaccgaggtaaagtatattattggataaaagaaagtaatagtgtgtttgcaaagaacttaatttttttgccaggactaacagcaaatcatcatctttttgatttccagatacagtacttttcaaaaaatcataatgtattggtatgggacgctcctgctcatggaaaatcaagaccttacttagatttctcatattctaacttggtagaagaattgaaagtaattttagataaacaaaatatgaaaaaggttgtacttatagggcaatcggcagggggatttgtggcacagtcctttattgtaaaatatccaaatatggtagaaggattaatgatgattggaacttgtccatatggaactgactattatagtaagtcagatattttctggttaaaacagactgaatggatgttaaagttattcccagataaattgttgcgaaacataatatctaagatgtgtggagctacgtctgaaggcagaaggagtatgatgaaaatgttagaaggctacgaaaaaaaagaactgtgtcatctcatgtatctgggatttgctgggttcatgccagaaattcaagacttaaatatacattgtccagtttgtttggtggttggagataaagacaagacgggtaaagtgagaaaatataatgagcagtggcacaataagactgggtatccattgcacattataaaaaatgcttcacataatgtaaatgtcgataaacctagtgaactaaatcagattatggatatatttattaagcaattaaatatataaaaactacatactcattaggtaaattatgtagtatatgtgtttacatatggttatagaaataaatatgtaataaactacttaacacttaaaaagtggatttgtccagagcataatacaaagcatgatatataaatttttaagcgaaatacatcaaaagaagtattagaattagtggagataaaacagctattagagattataaataaatagttttaaaggtactacgaatatagaggaaggtaaatcatacgttattcaaggattataaatgagtagtttaaaagtactatcggataggtctctgcatatttaaaccttagtaaaggtagttaaagtagtagtttaaaaactaaaaaattatataaaggaattaggtataagaaaatgattgagagtataccagcaaaacaaattttacaaaaagtgaaatttgacaatacaagatggtttggaattgactataatatgaatctctatcgtggttgttctcatggatgtatatattgtgatagccgtagcacaatatacaacatagagaattttgacaaagttagatataaagaaaatgtgatagagattttaagtaaagaattgcgttcaaaaagaaaaaaaggggtagtaggcattggagctatgtctgacacatataatccttttgaaaagcaactttgtattacaaagcaagcactagatttgatttcggaaaatcattttggagtgtctattgatactaaaagtagtttggtggttagagatataccgattttgcagaaaattaaaaaaaataattctgctattgtaaagttgactataaccactgcaaatgatgaattatcaaagaaaatagaaccttatgtaaatccaagttctgcacgatttgacgcagtgaaagaacttaatgattctggaattttttgtggcatattattgactcctatgcttccatttttgactgataataaagatgaaatacgagcaattgtagaaaaagcacacaaggctaatgcaaagtttatttattgcatgtatggtgtaacaatgcgtagtggtcagagagagtttttttatgagcatttaagagatatatcaccaaaattagtacttaaatatcagaaaacatatggtttaaactatgtatgtactatacaaaataaagattcttgtgagaagttgttaagagaagaatgtgcacgttatggtattttgacagatatgaaagagattataaaagcgtacaagaggtcggagtcatatattcaaataaaatttttttaagataggctttggatgagatataatagtggtgattgatgtgttgatattatagttgattgttagagaggatattatagatgaatattaatattgatattctaggtaattgctagaactaatattatagatgaatattagtattgatattctaggtaattgctagagttagtattatagatgaatattagtattgatattctaggtaactgctagagctaatattatagatgaatattagtattgatattctaggtaattgctagagctgatattatagatgaatattagtattgatattctaggtaattgctagagctgatattataatttattattaatattaatattctagggaattatcactatattttaaaaagtaaaaatatatatcaaaatgaactaaataagtactgtaagaagtttgttaaattaaggtttgaataaagtgagggtggagaacttatgatagaaataaaaactatagaaataaataaaaaaagtcaaattgaccttttaatgttagccgacccatgtgaagaaatgattgataaatatctcaataaaggaactatgtacgcattgtatgataataaagaacttacttgtatagcagttgtaaatgaaatttccaaagaaatatgtgaattaaaaaacattgctacatatgagcattttcaaaatatgggttatgcctcaaagatgatttatcatcttttagatgtttatagtaaaaaatattcatcaatggttgttggtacatctgaaagcggagttcctttttatgagaagtttggatttgtttattcacataaaattaaaaacttttttgtagataattatccagaaccaatctttgaaggagaattacaatgtgttgacatgttgtatctatcatataacttttagataggataatatttttaggtagatataattaattaattcatataattatcggaattataatttataaattatgtataataagagtataatttatttagaagctgttatattgtattatattcaaataagatatataataatttgtttattttgaattttggaggattaattatggattcaaataataatactataaaatcaactgttaaaaagggtatttcttttggttcttgtttagcaatgattatttcttatactgcatggaaatctattccatgggctatttttcatggcttaatgagttggatatatgtactttattattgggttaagtatgcatagattaaattaataaataagtatgtaatattgtaaagtttaagaaacaaaatgtaagggagtgtctcgaagtgaactttttagtttataaggcactcttttttgtattaaataaaatatattttcattacttaaacaatgaaaaagatgagtatctctattttaatacatacccttatattcattcatttatcaacaatagttttaaaaagaaagctatctaaaatctattgtaatctaagtgcttctctttaaagtcttaactttagtaatgatatataagtttataaggttcttatttcaataatgcaaattttacttagaagttcagactttggtatgaagaaatgggtaataataaaaaagaggtgttgatatgaaagaaaaattagaagaaaaatctaagattattaaaacatcaaaagagtataaacgaactataattgaagaaaaggacagagaatgaaccaaaaaattaaatgacatacttagtagaggtgatttttctaatgaaaaattagataaaatcaaggatttaattccaaaagaaatattgactagtgaaaatgttggagaagttgtaactgaagatgggtatgctaagcctgagtatgatgaggtatttaaatcattgtttactttaaataatgattacgatttacttgcaaattttataaatgatatcctcaaagatgctccatatgccaataggaatatcaaaccgttcactcatataaaaagaataattaaggctgaaaccgacccaacaattaattacattggtgagaaaagacctagactttatattttggctgaagatgaagaaagtaatcatataaatattgagatgcaaagagctcttgaagatgattatttggaaagagctgaatattatcttagtcgtgtacatggtagaaagttagaagaaggtaaagagtataaagaaattggaaaaactgttggaatacatatactaaatcatgtaaaatataatcacatagaagattatgtaaattgcctgagattaacaatggacgggcatccaaatatttattctagtaaaactgcattatattttatagaacttccaaaaattcgtaaatccagttgtatagcaaacagagttctaatatggggtaaacttattgataatccttctcatattgatattagaatactatctaaaacagattatgttattaaaagagcacttgatagattaaaagaattaggcagtaatgaggactatttattaaatttaaagagaggtgcgtatattatgaataaaagtagaaattttaaagaagaaatttttcaagaaggtgttgaaaaagggaaaagagaagagaaatttaatatcatcataaaattaaaaaataaaggatataatttgagtgaaatatgtgatattatagatgatttgaataaatcagaggttgaaaaaatctataatcaaaactaatactataattgagatggcactagataaatataaagcttcctcttttaaatttaaattaatataaaaccttgttatttaactatagtagatacaaagagatatataagctaaggagatgattcaaaataaaagtttgaactatctccttcttatagaaaaacaaaggggttgatttatatatgaaattttatactatacagactttagaattttggaacaacaataaaaacaataaatatctatcaaatgattattcttttatattagaagactttgatattccatacaaatggatgtatagtcaaatgacaaatagaatatatgaatttgatgatagtatgatatgggtttggacgaagagacctgatttaagatgtagtggttatttagaaaaaggaaaaaaaggtgttttacttgaaatagaaataagtgaagacaatgtgttattatcagaatttgatttatggcatttacctttaatggatattactgtagagctttatgaagatgaacaaattgaaaagaaggtaagttgggaaagaatatttgacttagaactgtgttcaaaattaaatgaagttaatatagaagatttgacattgcaaggagtgacatctaaagtgcctctatctaatgtaaaattaataaaagaatttgttgcaaaataatatttttattgaaatttattcaaaaaagttatatatttataacaagaggtgttataaatacataactttttaagggggattttatatgtctaaacaacaaactggtattaaatcaacacttatttcagaaatattgggaatttcttattgtattggagctacattagtaaataagtatttttttaaaggaagtagtattgaatatcttcctataattatttgggtattagctatgggagctcagtgggtctataataaaaagtatgatgatttaattgatgaggcatcaaaatgtatactatcaagagttaatgatattgcaataaaagtattgtttttttctgtagctatagtatctatatttcttgtaactttggacataaatgtgtcaaatttaaatataggaatgtctttattagtcattttgtttattcaatccttgttgaagttaattctatttatatattttgacagaaaggggatatacaattaggtgtcagtattactaaagacaaaaattaaatcctatagagaaaagaatcttatgacacaaggtgaacttgcaaagtcagtaggagtaagacgtgaaactattgtacatttagaaaatggtcgctacaatccttctttaaaactggcaatggatattgctaaggtatttgatacaactgtagaagagttgtttgaatttattgaagaaaataatatttaaatttcatgtattacttatgcattagagaatgaattaatagataaaaaattcaagtttatgtattagagaatgaattaattataggtaaaaaaccaagcttatagattagagaataaatgacttatagatgaaaaaccaagctcatagattaaagaatgaatgatttatagatgaaaaagaaagcttatagattagagaatgaattaattataggtaaaaaacaagctaatagattaaaaaatgaatgatttatagattaagaagtaagcttatagattagagaataaatgacttataaataaaaagaaagcttatagattagagaatgaattaattataggtaaaaaacaagcttatagattagagaataaatgacttataaataaaaaccaagcttatagattagagaatgaattaattataaataaaaaccaagcttatagataagaagtccatgcttataagccagaaaatgaatactttaatagattaaaaaatacatatttgtgaattatagaatgaataactccataaactagaaaatttataataatatctatatgaaaattagaattattttatcacaaaaaaattaagttaaataaatatgaaattacttccaaatatacttccaaaaacatgtaatcgcatatataatataattataaaaataataaatatttttatagtagtagttaattattaataaggaggggtcaaaatgcctagcatgattatggaagttgtaggagtactatttatagctattggattaatcttgacattcattgaaataaaaggaaatttcccttctttttatggttttggtcaaaattctatagggaaaaatgctgtaggtattatagcagcaggaattgctttaattttctttagaaatggcatagatagcatagattctatagctacttatggtgtatttttagcaatagaacttgttgtaatagttgcatatttcttaataagaaaaaaatttactaaagaagataaacatttaagaactaattaactaaattatctactataaaattggaaaattaaaaacaaataaaagtttgtttttaattatttaaaatcccaatttgattatttttaaagaaactatattctgtataaaactagaatgtggtttcttttttatgtataaaatattttttagcaaaagttaaaaggtgttttataatataaaatagttaattgtagatgttaataaaagaaaattatgtatatttcagataaagataagagagtatactatattttaattattttttcaataaaacttattgaaaagaactttaacttagaagagtatcaccaaattgcagatacaatatcataagcagttatttattgacaaccctttttaataaatatatcatttgaagtatactgacgaaaaggagttgaataataatggacatcttattggttgaagatgataagaatattcgagaaatggtatacgattttctgattagtgagaattattttgttaaaactgccgttgacggaaatacagctattgaaatatttaaaaattattcatttgatattattttactggacttgatgttaccaaagtctagtggttttgaagtattaaaatatatacgaagtgtgagtgttgttcctgttattattactactgcgaaagatagtgacacagataaaatgctagggcttaatcttggtgcagatgattatattacaaagcctttttcaatcgtagaattgcttgcaagaattaaagctaatattagacgtgcaacggtgtatagcagttcaagaaactctgaagatatggttattcagtataaagatttgattataaacatatcaaaatatgtagtttcaaagaatggaattgacttaaacttaacacatacagaatttgaaattgttaaattactagcgactaatcaaggacgtgctttttcaaaggaacaattatacaacactatttggaaagaaccttattatggaaatgaaaatgtgctaaatactcatattaacaggttaagaaataaattgtctgatggtatagaaaaaaataattatattaaaactctttggggaattggctacaaaatggaggaagaataatggagttatttttagttgtaatttcgattgtactatttgctttctacttaaaagaacgaaataagtcaaagaaaatggaaagtgattataagtatatcaattcaagacttcgtgatataacaaatgatgatgaaattaattatattttagtaccatctgatatttcgattgtaaaagaaacagcagtagatataaataaacttcttgaaaagttttacagtaggcaaattaattataatagaagtgaaaaagcgatattgcaaatatttacaaacatatcacacgatttacgaactcccatcacagtattaaagggttatattgaaatgctatatcttcaaagtcaaaaagaagaattatcttcttcaatgagagcaactttggaaaaaatgcaaacaaattcaaatgagcttgttaattcaataaataacctgtttaatatggcaaaaatccaatctggagatatgatattaaatcttcaaaaatccaatctaacacaattatgtcatgagattattttagagttttatgatttactagataaagaaaactttaatgttgaagttaatattgaagatagacctatatatgcaaatgttgacacagaagcattacaacgtatactcaaaaatttaattgataatgctataaaatatggttcagatggtagatttttagggatttcactatatgaaaaggaaaaacatgtttttatagatattgaggataaaggttcaggtatttctgaaactgaaaaagagcatattttcacaagagcttatactgctgacagaaaaaaaggcaatggtttaggtttggctatttctcaagggcttgcaaactctatgggaggttcaatttatgtaaatagtagacctaatgtaaaaacagtttttacggtaaaattgaaaagttagaaaaaagttagatttaaaagagagaaaagataattttattttgtatactgtttttagaaaggagggagtatgatgaactatatcatagagacccatcaattaaagaaaatatataaagataaagctgttgttaatgatgttaatattcatgtgaaaaagggagaaatttatggatttgttggaccaaatggagcaggtaaaagtacagtaatgaaaatgttgctaaatctcgttaagccaaattctggagaaatagttatgttcagtaagaaagtggcagaaactgattttgaaatattaaaaaagattggtactattattgaaaatccttatttctatgagaatttgactgctaaacagaatcttgatttacactgtgaatatatgggttattataacaaagaacatatatcagaggtattggaatgtgtcggattgtcaaagcaatcaaacaagaaagtttcaaaatattctttagggatgaaacaacgtcttgcaatagctagagcaattcttactaaaccagaattattgattcttgatgaacctataaatgcactcgacccagaggggataagagaaatgcgagaattattccgtaagttaaatacagattatggaataactatatttatttctagtcatattctttcagaggtagaacaaattgcggacactattggaattattcaagatggtaaacttattaaagaaatttctatgtcagatatacacaaatatcaaacagattatgttgaagtagatgtagataatgtggaacttgctggatacttgttagaaaaagaatttggaataaaagactttaaaattacttcggaaagttgtattgaaatatatgatttacgaaaagatgtaaaagaaatatccaaaatatttatcaaaaatcaaattggtataaatagcattggacgtaaacaaagttctttagaagattacttcttccaaactacaggtacaggaggtatagaaacactatgatacatttaatgaaactagaattaaaaaaagttgggctaaaaagatattttttattttcaatactggggattttgttatgtatgttttttgtctttactggattgaatgataaatctacttcaatatatgattatgatgttacatttaggacaatcagtttagttttctgtttttactatattatattatttgctgtgttgaatgtggcatatataataaatgaatatacaaataaaacaatcttgattttattctcttatccacttgaccgtaaaaaacttattttatcaaagttacttttgattacgactcttatgatatcatcaatgatagttggatatatctgttgttttacattcgttgttgtgttggataagtattttaatttagttattggagattttcatatttcaattttatcttattggataccaggagcaattaaaagtattattgtattttgctcattaggtatatggacattcgttgttggaatgataagaaaatcaatacctgttacccttgtcagttcaattatttttatcaatttaagacaatttattttagctggtacaaatacaactcaagacagtctgatttctgtttttattatagttggaataactgtgattggtatatattatatactaaatcataaagttactgaaattgactagatactgtggataggaaggtagttattaattgtatcttcttgggataataatgatttgctattatatcagctattattaatattattagagttttaataatattaataatagctatatattttttcttcttatttataaatttaatgatttatagtcataaaatgaactctaagaagagataaaaatgcgttttatatgtttttagattaatatgaaatatcacaatgaaatgttgtacaaagtgatatataataattatatgaactataaaattgactaaacttattgactaataaattagatgaaaagttgagacttactgaaaataaatacaatgaaatatatactacaagtattaaattaaatctgaactttacatactattagaataagtattataagattataatgatttaaaaatattaaaataattgaggtgataacatgaacaattcctttttagataaattgattgagacaaaagaacttaaaaattcactttataatgtgttaaaacacaattttctttatcattctaataagatagagggcagtacttttactactgaagcattagcacttttactcgataagaatgttgttacaggaagacatactttagatgatgtacaagaaactgttaattctagttatgtatttgatacagtaattgactcactgaaagagaaaataacacataatttcttaaggaatctacattcaagtttaatcttcaatacaaccctacattccagagggatggctggtatatataaaactatacccaatatgatactaggaactgatgtaagcatagcacaaccatttgaagttgagccaaagcttgatgaattaattgaatggtactatagtcagagtgaagtgtctattaaagttatagctgaatttcattatagatttgaattgatacatccatttcaagatggtaatggtcgcataggtagatttgttatgctaaaacagatgttagaaaataatcttcctataaaaattgtatcttgggatagtgaggacttgtatagaaactccttaaattcttgtagtttaggtaattatgtccctttaattgaatatttatcaagtttagaagattttagagaagtatataaaatgttatggaaataattgtttgtagcaaaaaaagtttttatataaatatatttttaactatgctatttaacgttgatttcttagttattcttagcttggactatacccactattttaactatataaaatagtggatatagtttaactatctctttataactatttttatgtatcttagttgtttcttaatattgggacagttcataaaactaaaagtgatttttaattttatcatttataatttaccattacatcagaaaaatgcttatcattagaattttcataaaaggtacctattttcttcaattaactaaatcaattctattagtcttaatctttcgtatttcaaattgataatacaagaaaataaaaaataaaaaattttaaattttttatttattgcgaaaaaaataaaaaggtgctatactttttgtaacatattattcaaattattaagagatagtaaatatttatagtttaatttgtagtacactagcatgatttgcagaacaatgaattaatctatagtataatagtttaatttgaagtacaacgatttaatctatagtacactagcatgatttgaagtataacgatttaatctatagtacaataacttgatttgcaatacaataatttaatctatagtataatagcatgatttgaagtataacgatttaatctatagtacaataacttgatttgaagtacaacgatttaatctatagtacaataacttgatttgcaatacaatgatttaatctatagtataatagcatgatttacagtacaataatttaaattgtagtacaaaagtactatcaaataagaatttctactttaaaaatattactaaaagtaattaaaatccaataattcaatataatatggcaaaagaatagaaataaggtgagagtagtgaaagtaaagtcaaatttagatgaaattttatatcataagattattgaaagtcttattcgtggtgaatactctgtaggtcaaaaaatattactaaatgacctttgtgaaaaatttgaagtaagcagaacaccagttgtacaagcagtaaaaatgctaaataaagatggagtgcttactattatgacaaatggtaaagtgtacgtaccagagtatgaatatgatatggtaaaacaagtttgtgaaacgagaacactgattgaaacatatgctttagaaaaaatgatgcaagaagaggaagaggtttttcaacaaaagctagatgtaataaaaagatactctgataaatgcgaggagtactatcgtcaagaaaaatctgtagaacttgcactagcagatttggaattacataaagccattgtagaaggggcaaataatgagattttaaatgatgtatatgttggtatacaaggaagatttatagtagtgaactatttaattcgaccattaaaaaatcgtaattatgaaggaacagtacaagaccattttgaaatattaaaattcattgaagacagagatacaaaaaaagcagtagataaactaagaaatcatattcaaggaactattaaaagattctgtgaagatgaataataagttttgaagttactatatacttatctattaagttgctaaatgtagtctaagtataatctaattatagtttaaacataatctaaatataatctaaatatagtgtaaataagtctaagtatgaattaaatatagattaagtatgaattaagcatggattaaatatactttaaattacaaatattacaaggaagccagaaggcttcctaaaaaaataacctttataaaattttttattttaaatttaaaattttttattttaaatttaaaataaaaaatgaaagaggtggtagagagtttgaaaaaaattactaaagaaaggatagaaaatactatgaaaaagctatttacgagcgaaacatttttggaatatcaatttataagtgattgccaaatatcaccagatggaggatatacagcatttattgtaaaaaaagctgatatcaaagagaatggttacacaagccaagtttatatattaaacaataaaactggcgaattaaaacaaataacgtctataaactctgttggagcatatgtctgggaagatgaaaatactatcttgttccctgctttgcgaaatgaaaaagtaaaagaagctgtcaaaaacggtaagcaatgcatgagttactatgctttatctttaaatggtggagaagcagaagaactttttagactccctatcaaaggtggtaaattgaatcctataggaaaaggtttgtatgcagttattgattcttatgacaatgaccgacctattgtagagggattgccagaagaagaacaacagaaaaaaataaatgcttataacaaaagacattatgaacatttcaaagaaattccttatgctgtcaatggggagggatatattagcagaaaaagaaaacgcctatatatatacgacagtaatataaataagttgaaggcaattacagcacctatgtttaatgttgtaggtatgaaaataagtgatggaaaaatcttatatatagggcaagagtttaaagatgtaaaaggtttgaaaaatggggtctatgtatttgatacaaacacaaacacaaatatctgtatattagaaaaagataagtatattataaaaggttttgaattatatcaaaatcaagtgatactaaacctaactgatgctttatcttatggaaatggagaaaatggagatttttatactattgatattgatacgaaagaaatgaaacttctttcagggcatcaacatcattgtattggaaatacagtaacatctgatgttaaaatgggtgctggtcagacaacaaaggtagatggagaatatatttattacacttctacagtagatatggactgcattattgaaagaatacatattccaacaggaaaacaggaaaaagtaacacagacaggttcagttgattttatagatgtaaaagatggcaatattgtatgtgtgggttgtttaggaaatggattaccagaagtttatacagtagagaatggaacattgtgtaagaaaacacatttaaatgaccatattttagaggaatataaaatttctgtgccagaatacatagagtcaaaaggaagttctaaatgggaaatacaaggatacgtatataaaccagtagattatgaggtggggaaaaaatatccagctgtattggcgattcatggaggaccaagattgacatatggaccatattttatgcatgagatacaggtatttacaagtgcaggttactttgtattcttctgtaacccaagggggtctgaaggtcgtggcaatgcttttgcagatattaggaaacagtttggagatattgattatatagattttatggaatttacagatactgtacttgaaaaatatacagacattgataaaacaaaattggctgttgaaggtggaagttatggtggatttatgacgaattggataattggtcatacaaaccgttttgctgttgcttgtgctcagcgttctattgcaaactggagtagcatggagggtacaacagacattggttattatttctgcaaaggacaaacaggtgcttctcatatggaaaaccacgagcttcaatggaaacagtcacctcttgcttatgctgataaatgtgttacaccgactttatttttacatggtgaaaaagactatagatgctatatgcaagaagcattccagatgttttcagcattgaaaattcatgggtgtcctacaaaactttgtctatttgaaggggaaaaccatgaactgtctcgttctggtagaccaaaacaaaagctacaaagattagttgaaatgctagattggttttctgtgtacataaaaaaagataacataggacagtagaaaggagaatataaaaatggaaaaaataaagattgaaagttcagatatttttgaatatatattccctcatgatatttcttgttcacctgatggaaagcatattgcttatattatatcaaatatcaacgaggaaaaagactgctatgaacatgacttatatgtgatggacatcaaaacagaaaaacaaatacatatgactcaaacaaaagatgtaacatcatttagttggatttctaatacagaactactttttacatctaaaagaaataagccaaaagcaggtacaacagatttttacactatttctatagaaggaggagaagcaaaagaagcattttctattccaaaagcttgtagcgtacctgtatcacttggaaataaattgtggttattgacaacaaaaaatccaacggattctaaaaaatcagaaccagatagggcagtagagggtgtagattattggacatttacagataaaccttttataagagatagagaaaatttttctcaaagaagacgtgtaacattagaattatatcaagaaggtgaaaatataacaaaagccattacaccaaaattttgtgaagtagcaggtatagacgtttcttctgataaaaacagaattttatatactggtcagatttatgaagattgtgcaactcctttttctggactttgggagtatcatatagacagtggtgaaaccaaagaacttgtaccacaaggaaagtaccaaataagtttggcaaaatatattggcaaagataaagtaatgttgcaagcttcaacattagaacgttctatcacacagaatcatgatatttttatacttgatttgagtactagtgaaataaatatgattgctagtccagatggtatgtatgctacattactggatgtagatgcagtatatggtggtggacgtagtaataaagttataggagataaatttattggtgcaagaatttgcagaactatgacagaatttaatgagtttgatacaaagacaggtaatatacgtatcatcacaaaagtagatgcttttacatcttttgatatttacgacaacaccatgtacacagtaatgttgaaagattatgagttagcagaaatatatagcattgatatgactacaggtacaatgaaaaaaatgactgctttttctaaaccatatttagatactcataaggtttcattacctgaaaaattgacgtttgtagcaaaaaataaagaagaagttgatggttttgttataccacctatagatgctaaagaaggcgaaaaatatcctgctgtattgttcattcatggtggacctaaatgggcatatggctatatgtttacacacttgaagcagtgtgtaacatcaaagggaatgtatgtgatttattgtaaccctcatggtggtgacggttatggtgaaaaattcttagaaatggtagaaagatgggggtatgttgactatgagcatcttatggaatttgtagatacttgtattgaaaaatatcctgggattgatgcagaccgcttaggggttgcagggggaagttacggtggttatatgacaaactggataattggccatacagaccgtttcaaagcagcagtttctcaaagaggtattagtaacttgattacagcttctttaattattgactttggggatagaattatgaagcagacttgtggagataagacgccttggaatcatgaggaggttctttggaatcattcacctattaaatatgtgaaaaatgttaagacaccaacattgttcttacatagtgatagggattatagatgttttatgggggatactttccaaatgtttacagcattaaaacagcttggtgtagatacagaaatgtatttgttccatggagatacatatggattgtctagaaatggaagaccatctaatagaattgcacgagcaaatgctattgtagattggtttgaaagatatttataataagggggttattctatgagtgatatgttattatggtttagtgtcgtattagttttatttgctattggggatttaattgcaagcaaaacaaaagcaaaagtatcagctgtatttgttacactacttttatttttgattctatttgtcacaaaagcaataccagctgatattattgaaaaagcaggtatgaccgcagcagctagttggagtgttccaatgattatgtttagtatgggaacaatgttgaatgttaaacaatttatagacgaatggagaacagtattgacagcatggcttggaattgtagcagttatagtctgtgtctcattatgtattcctttgtttggaaaatcaacagtattgacaagcataccagttataaatggagctttacctgctactactattatgacacaagcagcactagaaaaaggactgacacttgcagcagctacagcaacagttgtatttgcaattcagaagtttattggtacaccaatagcttcaagagcagcgttacaagaggcaaaccgtcttttagtagaatatcatgaagcaaaatcaaaaggcattgatttagcaaatgttgatactgataagaaagaagcagagaatacaggcacaaaagtaaaacaagctttctgtgaaaaatacgataaatattattctacaaatgtttgtatattttttatagcactattctcttatctagggtatgaactttcagagattattcatgtaaattattctattgtatgtcttgttgttggtgttattgtaacacgtattggtattgtaccaaaagacattttggaaaaaggaaaaatcaagggatttattaacatggttgtgtttgcagctgttattccttctttagcaaaagtttctttgacagatttaattagtctttttgtaccaattgtgggtatgtttgcagcttctatcattggtatattccttatgatgaaggtgttaccaggttggaaaattatcggttctaaacctcttgcttttggagtagggttttgtcagatgttgggattcccaactacatatttaatttcaaatgaagtgtgtaatgctgttggagaaacggaagaagaaagagcatatttgatgtctaagattatgcctaagctggtagttggtggtatggcttgtatgatttctattgtagtagctggtcttatggtaccaatgttgtagataggtttcatagttaaaaagtggtgttaatttataggagaagctaaaaagtagtattaatttataaaataattttatattagttaatttgttataagaatattttctttttatgattataattttgattttataagagagcagattttttatttgctatgctaatagttataatttgtttttatttgctaaaatgcaactttaatttgatttatgtataatatagggtatttaataatatttttgaagaatttttataaaaaattaaaaagaggagaaaaaagggagtgccacaaagtgaactttttagttctaaggcactcttttttgtacgaaatcgaatatattttcaacgttttaaaagtgagaaagagacttatctctagtttgggatagccaaatttaattattaaaattattttttgttttatttatcaaagagtattcgtgttttagaagttagtattttttattttatatatccaaggttttccgtttctaatgttttcttttttaaaataattagggtattcaattatagtaaaaggtggatggtattttggaatgatattatttaaagcacagtattgaatgttgaaatcctcacattttagagtattatcttttgtaatcaaaaaaatcttctatacttatagcaaggttacttctgcaaatattccatgcatcataatatccaaatttaaatttttttaatatagagtttacctctagtctacactcttgaataactctttcctctatccaaattcttataaactcatcccatttattactatctatttattactatctaaattttttagtatgtttgtaattggaaatggatttattcctttatgttttttataaatagtttataacttaatttattattaaacaaatcattcatacagaattactttttcttttagatattcaattcttacttttaataaatatttaatacattctatcttatgtggttttaaaaagtgtttatggctatcaataatctctaatatttcattcatatttattttgtcatagtaatattttacatcttttatattgacaaaaaagtgctctaagtgtatagtgtgtatataataacatcacactggaggtgataaaaaatgaaagtgctcatttctaacacatcagataagccattataccaacaaattaaagagcaaattaaagaagcaatatttactgaagaactgaaagaaggggatgcaatgccctcaataagaaattttgctaatgatttaaaagttagtattttgactattagacgagtgtatgaagaacttgaaaatgaaggttttcttacacgccaagttggaataggaacatttgtttcaactggaaatttagaaatactaagagactcaaagaggcgtatagttgaacaaaaaatggcagatatgattaaggatgcaaaagcactaggaattacacagatagagttacaagaaatgatgggtattctatatgaggaggattaatatggaaaatattttagaagtttataacttaaataagacttataccaatttttcattatctaatataagctttgtattaccagaagattgtataactggatttataggtgttaatggagcaggaaaaacaacaacaattcgttcgatattggatgtcgtaaagcgtgatagtggaaaaataaaaatctttggtaaagatttcgatggaaatgagaaggaattaaaaaatcgaattggagttgtatttgatgattcatatttctatgaggagttgtcaatgtcagaaatgaaaagtattattgcaccttcatatgataattggtgtgaagaagattatcaacaaaatatgaagcgttttaatcttaatccaaaacaaaagattgatacactttcaaaaggaatgaaaatgaaatttgctttagcattagcattatcgcataaagctgagtttttaattatggatgagcctacaagtggtttagacccactaatccgtagtcagatacttgacatactaacagaatatatgaagaaatgtggtcgtggtgttttcttttctactcatataacatctgatttagacaaaatagcagatatgattgttatgattgacaatggacgtattatattagagcgtgaaaaagatactctattggatgaacatagaaaagtaaaaggggatattcaatttctaaatgatgaaatcaaaaaattatttttaaatttagaaattacaggttatggttttatagggattacctcaaaaattaatgaagtgcaaaaaaatatgccagatattttaatagagcgtcctacaattgaagatattatgcttgcatatattgaaaggagagagtaattatgttgattcatttagttaaaaaagatattctgattgtaaaaaaatatgtattgttgatattgtttattgcaataggaatcccattatttatattatggcgtttacctccatttgcacaaatattgggatttgtactatcaattatattttcagaatttatgctgtgccagtatctattattaaaggagagtcaatattcaaaagcatctgtattactttgttcaactccttatcctagacgtggcttagttcaatctaagtatgttttatttgcaatggtatttatctattgtacattagtttactggattgaaaatttacttattccacaaataggaacttttgacttaacatatattttgattgttttattaataagttctattatttatggagtttatatgcctattcaatacaaattaggatatgaaacaacaaaattctttttcgtgatgataatcatggcttcatcatttgtattaccattaactatagctcacagcaattttgaaattccatttatatatcagtatccatccatgatagtgaatattgtattgttccttttaagtttaattatactgttagcttcaatgtttatttctattaaaatttttagtaataaggagcttgtataaggtaagggggaattttatatgccacatttgccagattgggctgttttactttgtatcttacttccaatagtatataaagcttgtcagatatttaaaagtaaaaaatagagtacatatttatattgccatttttattgagtgaagttagatggtatgaatttaaaaggttacttgaaaataaagttacttggtgtgggagagtaacatcataatattatagattatatgtttcttgtgaatcaatttgtattttttaatagataatatccagtaattttattttccattgattattttcaattatgagtatgattgtgtgtattgtataccatcttttaaggtgtttttaaaaaattatatcgtcaaaatataaatctaaggaatcctataaataaagcttttcaattttagaaaactaataaaaagtaggaagttaataaaaagaagctgtctcaaaatagagataagcttctttttcattgctgaaatgacgaaaatataattgatttaatataaaaaagagtgctttatgaactatttattttgaacagtagatacacttgcactcaatttagttactcctaagctttatgaactaaaagtttattttgaagcctatttttctaaataatcatctatatacagtattgcgtttcttttatttattcataatttattttcttattaaagtttttctatattactttacttttaattttatacgaattatcaaaaataaaatagttattagaaaaaaataaaagtaattgcaaagattgcaattacttacttctatattaattactataccataaaataacaaaaaaatcaagtcgagtaatccttcaacttaagtgatatactaggtattaataatttttaattaataaaatataactagaggaaaatctacattttctcaatttctttaattaaattgacctctaattaagtaattataaggagaaaaattatgaatttagcaaagggattagatgttttaaaaatttcatcaaatgtattcggtgaagataaagttatgtatattcctgtaatctacacagaagatgatgcaacacttattgacacaggtcttccgggtcaaggtgatttaataattgatgctcttaataaaagtaacacgagctttgataggttaaaaaatataataattactcatcatgatatagaccatataggaaacataaattatctaagagaaaaatctaagaataatatcaaagtatatgcatacaaaagtgaagtcagttatataacaggagaagaaactccttttaaactttatatgttggaacaaatggtagataaaattgatgataagatgcttagtatgctaaatgttatggtacttggatttaaatcatcatatactaaagtagatgtgtcattagataaccatgaaaaattgaatctaggtgaggaaatagaagttatacatacaggaggtcacactagaggtcacatatgtctttatttaaaagagtctaaagtacttattgctggagatttgttacaggtagaaaatggagaacttacgcctgttgatgtaatgcacagcaacaaacaagagttaaaagatgctattaaaaatataagtaattatgatatagaaacgatagtttttagtcatggtggattatatcaaagagacataattggaacattgaaaaacctaattattgagtagtactatatgatttacaataatttcttaaattacttaaaattatatctaaagatgtagaatcaaaattaaatataagtaataagaattttgctttaaaattatacttaagtgttaagtatgatacgtagtattacaagtattttagaatataattttttatagtaattttaaggttctacaatacttcagttgaaaaatatttaacagcatagtataataggaaagaaaatattttaaataaactttagtatacaaagtgaagaaaaatatttaaattatatataatattgtagagtgaggtaaaatatttaagttatatatcataatacagagtgaagaaaaatatttagataatgtaccataatacaaggtgagtaaaaatatttaaagcatgtataataatgcaaagcgaagaaaaatatttaaataatgtaccataatgcagagtgagtaaaaatatttaaataatgtgttataatacaaagcgaataagattatttaaagcatgtattataatataaagtgagtaaaaatatttaaatcatgtatcataatataagcagagtgaagaaaaatatttaaataatatatcataatgtagagtgaggtaaaatatttaagttatgtatcataatacaaagtaaagaaaatcatttaaattatatatcataaaaataatatgaaatattgaacactcataatattggaggctttaatattttaattgataggttacattatttataacattaaaaatacaatttacataaaatagacatatgaaaaataaaaaattatataataattatgggaatgaggttctcccttggatgataatatcctaaactgccaatgagctgatgacttctatgatatcatagatgccaccagctttttttgttgtttaaatcgataaaatggaggtgaattacttactaaatttttattttttaaatttgaagaaatatttaattaatagaaaaaacagtagattatatgttaattattttattaagaatgggttaagagtatacctatatcctatcaatttaaaaaacaattatgatagtcattacattgactacagttgatgcaataaaactttcaaaaaatcttatgatgcaaatagaaaggaattaaaatgatagaaaaatttaaaactttaatatggattaaaatgataataagaattaaaagcgtttataaaacatatggtggactatttttgttaggactcataggtataccagttggtgcaattataggtcttatagacaccatatttggaacggttcttctaaaagttacagatattcgagaaacatatccaatgtatctgataccatttttagcagtagtaggagttgttattgcttattgctattttaaatttggaggaaaaagtagtaaaggaatgaatctaatatttgaggtagggcatggagaagaagaaattattcctttaagattggttccatttataatatcaggtacatggttaacccatttatttggtggtagtgcaggacgagaaggagttgctgttcagattggtgcaactttttcacattgggtaggtaaaaggttgcctataaaaaatgcttctagtatttttctagtaactggtatagcagctggttttgcaggattatttgagacaccaatagcagcaatactatttgctatggaggttttggtagctggttcactggagtatcaatcgctttttcctgcgtttactgcttcttttacagcaagtgcagtatcaaaaactttagggttagagaaattttcttttgcactttcttctaaagttgtatttgacttaccaatattttggaagcttattgttttaggaattatttttggaatggttggtggagcatttgcatggtgcctgaaattgtcaaaaagaaaaataggtaatagattaaaaaatcctatgataaggattgctattattggagtatgtcttagtgtattattccttttattttataaaggaagatattcaggtttagggacaaatttaattcaaaatagtttttatggtggagaaatttattcatttgactggctgttaaagtttatacttacaatactgactttgtcagcaggttttcaaggaggagaggttacacctttgttttccattggagctagtcttggtgtattgttagcaggattttttaatttgccaattgaattagttgcagcgcttggctatgctagcgtctttggcagtgctacaaatactttttttgctcctgtatttataggggcagaagtttttggatacagctatttaccttatttctttgtagtatgcgctatttcatatatatttaatatggataaatctatttattcactacaaaaaatttcaacgaaacaataaataaaacaacataatgtatgattataagagaaagaatattagagaaaggatagggtaggaatatgttgacaagtttagctttgatttttttattaggaatggcctcgggaggtatttttgagaagataaaattacctagcttattgggaatgttacttacaggaatcatattgggttcatatgttttaaatttgattgataattcaatactagatatttcttctgaccttagaaagattgcattgattattatattaacaagggctggattatctttagatataaacgatttgaagaaagtgggaagacctgctgtacttatgtgctttattccagctacttttgaaattatcggaatgatagttttagcaccaaaattactaggcgtttctatattggaagcagcagtcatgggtgcagtagtaggagcagtttctcccgcaattattgtacctaaaatgcttaaattaatggaagaaggttatggtacagaaaaaagtattccacagatgcttttagcaggaacttctatagacgatattttcgtaattgtgatgtttacagtattcacaggattggcacaaggaaatagtatatcagctattagttttttacaaattccagtatcaattatattaggtgtaatagttggagcagtgattggaatctgtttagcagtattttttaagaaggttcatatgagagattctgctaaaggggtgttgcttttaagtatctcatttttaatgataagtttggagactgctttagagggtattgtgccattttctggattattagcagttatgaatattgggattttccttcagataaaatatcgtgtagttgcaagaagattgtctgtaaagtattcaaaactatgggttggtgctgaaattctcttgtttgttttggtaggggcaacagtagatataagttatgcatttaaagcaggaattggagctgtaattttaatatttggagttcttttattccgtatggtaggagtattcttctgccttattaagacaaatttgacaataaaagaaagattgttctgtatgattggctatattccaaaggctacagtacaggcagcaataggaggtgtaccacttgcaatggggatagcatctggacaacttattttgacattagcggttctcgctatacttataactgcacctcttggagcttttggaattgatgtaacttataaaaaattattaacttctgtagaaggtaagagtaagtaagaataaaaataaagattattttaagtgataaattatattttggaaaaaactatattattgagtacaatgttagaaaatcatttgagtgattacagaaggtagaagtttatatcggattttaaggcatgtgatgattattagaattgattttgtgaaattgttattgtaatatttaattatatagataaagaagcggagtgataactatgtatttaaaaaaattatcaaaattagagttagttattatgaaatttatttggaatttagatataaaaaccaattcatatgagattattgattatatgaaagaagagcataatttaccagaaaaagtggctttaaaaattttatcaaaattatcaaagaaaagattcttatatgttcaagaaacaggcaagtgtatgtattatacagttgcaataaaagaaaagacatatttagagtttatatcaagaaatgtgcaaaatcttttgaagaataattttataaggaatttattagtatcatttcacgaagaggagctaacagaggaaaagataaagtcgttagaaaactgggtagtaaattgggaagaagcttatatataaatgttattatttttattacaatttagataattttggttttgtaagctctgcaactatttttagatggttgcagagcttatttttattttttattcccttaagcaatacttaaaagtaaacgcatttatatttactaacttcaatcacttctaatacttagattactttttaaaaatattttgatatgtcatctctatagtaatctagaacttgtttctattctttatataaagtttttatgaatgatatatataatattcgttcatttgattaaaaataacaaaatattaaataattctactctgatagtttgttaaaaaaataataaaaaatattaataaacaaaaaaaaaaattatcttaagagaggagaatgttctaaaatataaaaaggtttctagatttcataaaagatactattttagtcttgaaaatatttagtttgaaaagattttaatttaatgattgattaagttaaaaatgtgcatgtaataaattttattttatttattgactaaattataaagtttacataattatttaataattatgtaattgttacttaaaaattgatctattttaaaatctagttataacttcgaaaaagactgaaaattaagaaaaaagaaatataagtataaaaatatatcatatagattttttttattttactttaataaaatgatttgtttttacaatactttattaatataaagtttattgctaaaatactttatttattagaaaaaaattactaattaattattaaaattaatgtatttataatgcgtattttcatataaaatttaatttatttgccgattatataattataatgactgatttaattccaatgttgtcaaaatttttaaataaatcatcattataaatataagagaggatgattttatgcaaaagtctttttatgaattaattgttttagcaagaaataactcagtagatgatttgcaagaaattttatttatgtttaagccattagtaaaaaaacttagtagagttttacattatgaagagggagaaacagatttaataatattttttattgaattaataaaaaatattaaattaagtagcttttcagaaaaaagcgatgctattatagtcaaatatattcataaatcattactgaataagacttttgagttgtctagaagatattctaaaatgaagtttaattttgtagaatttgatgaaaatatcttaaatatgaaaaataattatcaaagtaagtctgtttttgaggaagatatttgttttttcgaatatattttgaaagaattatctggtattcaaagaaaagttattttttataaatatttaaaaggatattctgatagagaaatatcagtgaaattaaaaatatctagacaagctgttaataaggctaaaaatagagcatttaaaaaaataaaaaaagactatgaaaattattttaacttgtaattaatgaatttaaagaaatatttacaatagaaatcaaattttagaattaactttattgtaaaatcaataacttaatctaagaatatcttaatttttatattttatatagaacaaagtttacatatttatttcagacaacgtctttattcaatcgaagagcaaattaatcaactgagtgtcttcaatttaaaatgttaggaagtgaatgtatatgaaaacctaagtagatattagtatattttataaatagaaaggaggatatataaaagagttttagcatttagatgtaaaaatattcaataaaaatattatagtaaaggagaaaattttatgagtttagttaatagaaaacagttagaaaaaatggcaaatgtaagatttcgtgttcaggaagatgaatatgtagcaatattggatgctttagaagaatatcataatatgtcagagaatactgtagtcgaaaaatatttaaaattaaaagatataaatagtttaacagatatttatatagatacatataaaaagtctggtagaaataaagccttaaaaaaatttaaggaatacctagttacagaagtattagagctaaagaataataatttaactccagttgagaaaaatttacattttgtttggattggaggtcaaataaatgacactgctattaattatataaatcaatggaaagatgtaaatagtgattataatgttaatgttttttatgatagtaatgcatttttgataaacacattgaaaaaaactatagtagaatcagcaacaaatgatacacttgaatcatttagagaaaacttaaatgaccctagatttgactataataaattttacagaaaacgtatggagataatctatgataagcagaaaaatttcataaattactataaaactcaaagagaagaaaatcctgaccttataattgatgatattgtaaagatatatctttcaaacgagtattcaaaggatatagatgaacttaattcctatattgaagagtcattaaataaagttacagaaaatagtgggaatgatgttagaaactttgaagaatttaaaggtggagagtcattcaaattatatgaacaagagttggtagaaagatggaatttggcagctgcttctgacatattaagaatatctgccttaaaagaagttggtggtgtatatttagatgttgatatgttaccaggaatacaaccagacctatttgagtctatagagaaacctagttcagtaacagtggatttttgggaaatggtaaaattagaagctataatgaaatacaaagaatacataccaggatatacttcagagcattttgatatgttggatgaagaagttcaaagtagttttgaatctgttctagcttctaagtcagataagtcagaaatattctcatcacttggcgatatggaggcatcaccactagaagttaaaattgcatttaatagtaaaggtattataaatcaaggactaatttctgtgaaagactcatattgtagcaatttaatagtaaaacaaatcgagaacagatataagatattgaataatagtttaaatccagctattagcgaggataacgatttcaatactacaacgaatgcttttattgatagtataatggctgaagctaatgcagataatggtagatttatgatggaactaggaaagtatttaagagttggtttcttcccagatgttaaaactactattaacttaagtggccctgaagcatatgcggcagcttatcaagatttattaatgtttaaagaaggtagtatgaatatccatttgatagaagctgacttaagaaactttgaaatctctaaaactaatatttctcaatcaactgaacaagaaatggctagcttatggtcatttgacgatgcaagagctaaagctcaatttgaagaatacaaaaaaaattactttgaaggttctcttggagaagatgacaatcttgacttttctcaaaatacagtagttgacaaggagtatcttttagaaaaaatatcttcattagcaagaagttcagagagaggatatatacactatattgttcagttacaaggagataaaattagttatgaagcagcatgtaacttatttgcaaagactccttatgatagtgtactgtttcagaaaaatatagaagattcagaaattgcatattattataatcctggagatggtgaaatacaagaaatagacaagtataaaattccaagtataatttctgatagacctaagattaaattaacatttattggtcatggtaaagatgaatttaatactgatatatttgcaggtcttgatgtagattcattatccacagaaatagaaacagcaatagatttagctaaagaggatatttctcctaagtcaatagaaataaacttactgggatgtaacatgtttagctattctgtaaatgtagaggagacttatcctgggaaattattacttagagttaaagataaagtatcagaattaatgccatctataagtcaagactctattatagtaagtgcaaatcaatatgaagttagaataaatagtgaaggaagaagagaattattggatcattctggtgaatggataaataaagaagaaagtattataaaggatatttcatcaaaagaatatatatcatttaatcctaaagaaaataaaattatagtaaaatctaaaaatttacctgaattatctacattattacaagaaattagaaacaattctaattcaagtgatattgaactagaagaaaaagtaatgttagcagaatgtgagataaatgttatttcaaatatagatacacaagtggtagaaggaaggattgaagaagctaaaagcttaacttctgactctattaattatataaagaatgaatttaaactaatagaatctatttctgatgcactatacgatttaaaacaacagaatgaattagaagagtctcattttatatcttttgaggatatattggagactgatgaaggctttagtataagatttattgataaagaaactggagaatctatatttgtagaaactgaaaaggcaatattctctgaatatgctaatcatataactgaagagatttctaagataaaaggtactatatttgatactgtaaatggtaagttagtaaaaaaagtaaatttagatgctacacatgaagtgaatactttaaatgctgcattttttatacaatcattaatagaatataatagttctaaagaatctcttagtaatttaagtgtagcaatgaaagttcaagtttatgctcaattatttagtactggtttaaatactattacagatgcagccaaagttgttgaattagtatcaactgcattagatgaaactatagatttacttcctacattatctgaaggattacctgtaattgcaactatcatagatggtgtaagtttaggtgcagcaatcaaagagctaagtgaaacaagtgacccattattaagacaagaaatagaagctaagataggtataatggcagtaaatttaacagcagctacaactgcaatcattacttcatctttaggaatagctagtggatttagtatacttttagttcctttagcaggaatttcagcaggtataccaagtttagtaaacaatgagcttatcctaagagataaagcaacaaaagttgtagattattttagtcatatatcattagctgagtctgaaggagcatttacttcattagatgataaaataatgatgccacaagatgatttagtaatatctgagatagactttaataacaattcaataactttaggtaaatgtgaaatctggagaatggaaggtggctcaggtcatactgtaactgatgatatagatcacttcttttcagcaccatcaataacatatagagagccacacttatctatatatgacgtattggaagtacaaaaagaagaacttgatttgtcaaaagatttaatggtattacctaatgctccaaatagagtatttgcttgggaaacaggatggacaccaggtttaagaagcttagaaaatgatggcacaaaactgttagaccgtataagagataactatgaaggtgagttttattggagatattttgcttttatagctgatgctttaataacaacattaaaaccaagatatgaagatactaatataagaataaatttagatagtaatactagaagctttatagtcccagtgataactacagaatatataagagagaaattatcatattctttttatggttctggaggaacttatgcattatctctttctcaatacaatatgaatataaacatagaattaaatgaaaatgatacttgggttatagatgtcgacaatgtcgtaagagatgtcactatagaatctgataaaattaaaaaaggagatttaatagagaatattttatctaaattaagtattgaagacaataaaattattttagataatcatgaaattaatttctctggaacattaaatggaggtaatggatttgtatctttaacattctcaatcttagaaggaataaatgcagttatagaagttgatttattatctaaatcatataaagttcttatttctggtgaactaaaaacattgatggcaaattcaaattctgttcaacagaaaatagattatataggattgaacagcgaattacaaaaaaatataccttatagttttatggatgataaaggaaaagaaaatggatttattaattgttctacaaaagaaggtttatttgtatctgaattatctgatgtagttcttataagtaaagtttatatggacaatagtaaacctctatttggatattgtagtaatgatttgaaagatgttaaagtcataactaaagatgacgttattatattaacaggatattatttaaaagatgatataaaaatctctctttcttttactatacaagatgaaaatactataaaattaaatggagtatatttagatgaaaatggagtagctgaaatattgaaatttatgaataaaaaaggtagtacaaatacttcagattctttaatgagctttttagaaagtatgaatataaaaagtattttcataaattccttacaatctaatactaagcttatattagatactaattttataataagtggtactacttctattggtcaatttgagtttatttgtgataaagataataatatacaaccatatttcattaagtttaatacactagaaactaaatatactctatatgtaggtaatagacaaaatatgatagtagaaccaaattatgatttagatgattctggagatatatcttcaactgtcattaatttttctcagaaatacctttatggaatagacagttgtgttaataaagttataatttcgccaaatatatatacagatgaaataaacataacacctatatatgaagcaaataatacttatccagaagtgattgtattagatacaaattatataagtgaaaaaatcaatattaatatcaatgatttatctatacgatatgtatggagtaatgatggaagtgattttattcttatgtcaactgatgaagagaacaaggtatcacaagttaaaataagatttactaatgtttttaaaggtaatactatatcagataagatatcttttaattttagtgataagcaagatgtatctataaataaagttatttcaacatttacaccttcatattatgtggaaggattacttaattatgatttaggtctgatttctttatacaatgagaaattttatattaataactttggaatgatggtgtctggattagtatatattaatgattcattatattatttcaagccaccaataaagaacttgataactggatttacaactataggtgatgataaatactactttaatccagataatggtggagctgcttcagtcggagaaacaataattgatggcaaaaactactacttcagccaaaatggagtgttacaaacaggtgtatttagtacagaagatggatttaaatattttgctccagcagatacacttgatgaaaatctagagggggaagcaattgattttactggcaaactaactattgatgaaaatgtttattattttggagataattatagagcagctatagaatggcaaacattagatgatgaagtgtactattttagtacagatacaggtagagcttttaaagggctaaatcaaataggtgatgataaattctatttcaactctgatggtattatgcaaaaaggatttgttaatataaatgataagacattctattttgatgattctggtgtgatgaagtcaggatatactgaaatagatggaaaatatttttactttgctgagaatggagaaatgcaaataggagtatttaatacagcagatggatttaaatattttgctcatcatgatgaagatttaggaaatgaagaaggtgaagcactttcatattctggtatacttaattttaacaataagatttattattttgatgattcatttacagcagtagttggatggaaggatttagaagatggttcaaaatattactttgatgaagatacagcagaagcatatataggtatctcaataattaatgatggtaaatattattttaatgattctggaatcatgcaaattggatttgtcacaataaataatgaagtattttatttctctgattctggaatagtagaatctggaatgcaaaatatagatgataattatttctatatagacgaaaatggtctagttcaaattggtgtatttgacacttcagatggatataaatactttgcaccagctaatactgtaaatgataatatctatggacaagcagttgaatatagtggtttagttagagttggtgaagatgtatattattttggagaaacatatacaattgagactggttggatatatgatatggaaaatgaaagtgataaatattatttcgatccagaaactaaaaaagcatataaaggtattaatgtaattgatgatataaaatactattttgatgagaatggaataatgagaacaggtcttataacatttgaagataatcattactattttaatgaagatggtattatgcaatatggttatctaaatatagaagataagacgttctactttagtgaagatggtattatgcagattggagtatttaatacaccagatggatttaaatattttgcacatcaaaatactttagatgagaattttgagggagaatcaataaactatactggttggttagatttagatgaaaagagatattattttacagatgaatatattgcagcaactggttcagttattattgatggtgaggagtattattttgatcctgatacagctcaattagtgattagtgaatagataaaaatacgttaaatatatcctcttatacttaaatatataaaaataaacaaaatgatacactacataaagtgttctatctaatatgaagatttaccaataaaaaggtgaactatgatgaatgcacagtagttcacctttttatatttctaatggtaacaaaatatttttttatataaacctaggaggcgttatgaatatgacaatatcttttttatcagagcatatatttataaagttagtaattttaactatatcatttgatacattattaggatgtttaagtgcaataaaaagtcgtaaatttaattctagttttggaatagatggaggaatcagaaaagtagcaatgatagcatgtatattttttttatcagtagttgacattcttacaaagtttaactttttatttatgttaccacaagattgtatcaattttttaagactaaaacatcttggaatatctgaatttttctctattttatttattttatatgaaagtgtaagcatattaaaaaatatgtgcttatgtggattaccagtacctaagagattaaaggaaaaaatagcagttttactagatgcaatgacagatgaaatgaatgctaaggatgaaaagtaagtaatggtagatataataaaaatattaacaaataaaaagtgttatccaaataagaatagctgaaagttatcataattcatgaaactgataatgaaaacgagggagcagatgccaagagacacacaagtattaaatacatataatttcgaagcaagtgttcattactatatggatgacaaggtagtatatcaaacattggttcacaaagatggtgcatggtcagttggtaaaatctattaagctacattagttacagatatcacaaactataatagttaaacatagaaatatgtgtaaattgtgatggaaattattcaaaaacacaaaaatacgtgatgaaggacaaaatgatagagaaaataagtatcaaaccttaataaatgatttaattgatagtttaaaagttataggaaaaatatataaagaaataaaaacattaaaaaaatataagatatgtttacaaattactatcagacaatctccttatctaatagaagagtcaattaactaattgagtatctttaaattgaaatgttaggaagtgatttaaatatgaaaacttaaattataaaaaatcaatattaatttatctttaaaaaatagaaaggagtgtataagatttattttcaaagtttaaaaacaagaaaatcaatttaaatttcagaaggaataaatgtggttatagaagtggatttattatcaaaaataatagtactaggaggtttttatgtctttaatatctaaagaagagttaataaaactcgcatatagcattagaccaagagaaaatgagtataaaactatactaactaatttagacgaatataataagttaactacaaacaataatgaaaataaatatttacaattaaaaaaactaaatgaatcaattgatgtttttatgaataaatataaaaattcaagcagaaatagagcactctctaatctaaaaaaagatatattaaaagaagtaattcttattaaaaattccaatacaagtcctgtagaaaaaaatttacattttgtatggataggtggagaagtcagtgatattgctcttgaatacataaaacaatgggctgatattaatgcagaatataatattaaactgtggtatgatagtgaagcattcttagtcaatacactaaaaaaggctatagttgaatcttctaccactgaagcattacagctactagaggaagagattcaaaatcctcaatttgataatatgaaattttacaaaaaaaggatggaatttatatatgatagacaaaaaaggtttataaattattataaatctcaaatcaataaacctacagtacctacaatagatgatattataaagtctcatctagtatctgaatataatagagatgaaactttattagaatcatatagaacaaattctttgagaaaaataaatagtaatcatgggatagatatcagggctaatagtttgtttacagaacaagagttattaaatatttatagtcaggagttgttaaatcgtgggaatttagctgcagcatctgacatagtaagattattagccctaaaaaattttggcggagtatatttagatgttgatatgcttccaggtattcactctgatttatttaaaacaatacctagacctagctctattggactagaccgttgggaaatgataaaattagaggctattatgaagtataaaaaatatataaataattatacatcagaaaactttgataaacttgatcaacaattaaaagataattttaaactcattatagaaagtaaaagtgaaaaatctgagatattttctaaattagaaaatttaaatgtatctgatcttgaaattaaaatagctttcgctttaggcagtgttataaatcaagccttgatatcaaaacaaggttcatatcttactaacctagtaatagaacaagtaaaaaatagatatcaatttttaaaccaacaccttaacccagccatagagtctgacaataacttcacagatactactaagatttttcatgattcactatttaattcagctaccgcagaaaactctatgtttttaacaaaaatagcaccatacttacaagtaggttttatgccagaagctcgctccacaataagtttaagtggtccaggagcttatgcatcagcttactatgatttcataaatttacaagaaaatactatagaaaaaactttaaaagcatcagatttaatagaatttaaattcccagaaaataatctatctcaattgacagaacaagaaataaatagtctatggagctttgatcaagcaagtgcaaaatatcaatttgagaaatatgtaagagattatactggtggatctctttctgaagacaatggggtagactttaataaaaatactgccctcgacaaaaactatttattaaataataaaattccatcaaacaatgtagaagaagctggaagtaaaaattatgttcattatatcatacagttacaaggagatgatataagttatgaagcaacatgcaatttattttctaaaaatcctaaaaatagtattattatacaacgaaatatgaatgaaagtgcaaaaagttactttttaagtgatgatggagaatctattttagaattaaataaatataggatacctgaaagattaaaaaataaggaaaaagtaaaagtaacctttattggacatggtaaagatgaattcaacacaagcgaatttgctagattaagtgtagattcactttccaatgagataagttcatttttagataccataaaattagatatatcacctaaaaatgtagaagtaaacttgcttggatgtaatatgtttagttatgattttaatgttgaagaaacttatcctggtaagttactattaagtattatggacaaaattacttccactttacctgatgtaaataaagattctattactataggagcaaatcaatatgaagtaagaattaatagtgagggaagaaaagaacttctagctcactcaggtaaatggataaataaagaggaagctattatgagcgatttatctagtaaagaatacattttttttgattccatagataataagctaaaagcaaagtccaagaatattccaggtttagcgtcaatatcagaagatataaaaacattattacttgatgcaagtgttagtcctgatacaaaatttattttaaataatcttaagcttaatattgaatcttctattggtgattacatttattatgaaaaattagaacctgttaaaaatataatccacaattctatagatgatttaatagatgagttcaatctacttgaaaatgtatctgatgaattatatgaattaaaaaaattaaataatctagatgagaagtatttaatatcttttgaagatatctcaaaaaataattcaacttattctgtaagatttattaacaaaagtaatggtgaatcagtttatgtagagacagaaaaagaaattttttcaaaatatagcgaacatattacaaaagaaataagtactataaagaatagtataattacagatgttaatggtaatttattggataatatacagttagatcatacttctcaagttaatacattaaacgcagcattctttattcaatcattaatagattatagtagcaataaagatgtactgaatgatttaagtacctcagttaaggttcaactttatgctcaactatttagtacaggtttaaatactatatatgactctatccaattagtaaatttaatatcaaatgcagtaaatgatactataaatgtactacctacaataacagaggggatacctattgtatctactatattagacggaataaacttaggtgcagcaattaaggaattactagacgaacatgacccattactaaaaaaagaactagaagctaaggtgggtgttttagcaataaatatgtcattatctatagctgcaacggtagcttcaattgttggaataggtgctgaagttactattttcttattacctatagctggtatatctgcgggaataccttcattagttaataatgaattaatattgcatgataaggcaacttcagtggtaaactattttaatcatttgtctgaatctaaagaatatggccctcttaaaacagaagatgataaaattttagttcctattgatgatttagtaatatcagaaatagattttaataataattcgataaaactaggaacatgtaatatattagcaatggaggggggatcaggacacacagtgactggtaatatagatcactttttctcatctccatatataagctctcatattccttcattatcagtttattctgcaataggtataaaaacagaaaatctagatttttcaaaaaaaataatgatgttaccaaatgctccttcaagagtgttttggtgggaaactggagcagttccaggtttaagatcattggaaaataatgggactaaattgcttgattcaataagagatttatacccaggcaaattttactggagattctatgcctttttcgattatgcaataactacattaaaaccagtgtatgaagacactaatactaaaattaaactagataaagatactagaaactttataatgccaactataactactgacgaaattagaaacaaattatcttattcatttgatggagcaggaggaacttactctttattattatcttcatatccaatatcaatgaatataaatttatctaaagatgatttatggatatttaatattgataatgaagtaagagaaatatctatagaaaatggtactattaaaaaaggaaatttaatagaagatgttttaagtaaaattgatataaataaaaataaacttattataggcaatcaaacaatagatttttcaggtgatatagataacaaagatagatatatattcttgacttgtgagttagatgataaaattagtttaataatagaaataaatcttgttgcaaaatcttatagtttgttattgtctggggataaaaattatttgatatccaatttatctaatactattgagaaaatcaatactttaggcctagatagtaaaaatatagcttacaattacactgatgaatctaataataaatattttggagctatatctaaaacaagtcaaaaaagcataatacattataaaaaagacagtaaaaatatattagaattttataatggcagtacattagaatttaacagtaaagactttattgctgaagatataaatgtatttatgaaagatgatattaatactataacaggaaaatactatgttgataataatactgataaaagtatagatttctctatttctttagttagtaaaaatcaagtaaaagtaaatggattatatttaaatgaatccgtatactcatcttaccttgattttgtgaaaaattcagatggacaccataatacttctaattttatgaatttatttttgaacaatataagtttctggaaattgtttgggtttgaaaatataaattttgtaatcgataaatactttacccttgttggtaaaactaatcttggatatgtagaatttatttgtgacaataataaaaatatagatatatattttggtgaatggaaaacatcgtcatctaaaagcactatatttagcggaaatggtagaaatgttgtagtagagcctatatataatcctgatacgggtgaagatatatctacttcactagatttttcctatgaacctctctatggaatagatagatatatcaataaagtattgatagcacctgatttatatacaagtttaataaatattaataccaattattattcaaatgagtactaccctgagattatagttcttaacccaaatacattccacaaaaaagtaaatataaatttagatagttcttcttttgagtataaatggtctacagaaggaagtgactttattttagttagatacttagaagaaagtaataaaaaaatattacaaaaaataagaatcaaaggtatcttatctaatactcaatcatttaataaaatgagtatagattttaaagatattaaaaaactatcattaggatatataatgagtaattttaaatcatttaattctgaaaatgaattagatagagatcatttaggatttaaaataatagataataaaacttattactatgatgaagatagtaaattagttaaaggattaatcaatataaataattcattattctattttgatcctatagaatctaacttagtaactggatggcaaactatcaatggtaaaaaatattattttgatataaatactggagcagcttcaactagttataaaattattaatggtaaacacttttattttaataataatggtgtgatgcagttaggagtatttaaaggacctgatggatttgagtattttgcacctgccaatactcagaataataacatagaaggtcaggctatagtttatcaaagtaaattcttaactttgaatggcaaaaaatattattttgataatgactcaaaagcagtcactggatggaggattattaacaatgagaaatattactttaatcctaataatgctattgctgcagtcggattgcaagtaattgacaataataagtattatttcaatcctgacactgctatcatctcaaaaggttggcagactgttaatggtagtagatactactttgatactgataccgctattgcctttaatggttataaaactattgatggtaaacacttttattttgatagtgattgtgtagtgaaaataggtgtgtttagtggctctaatggatttgaatatttcgcacctgctaatacttataataataacatagaaggtcaggctatagtttatcaaagtaaattcttaactttgaatggtaaaaaatattactttgataataactcaaaagcagttaccggatggcaaactattgatagtaaaaaatattactttaatactaacactgctgaagcagctactggatggcaaactattgatggtaaaaagtattactttaatactaacactgctgaagcagctactggatggcaaactattgatggtaaaaaatattactttaatactaacacttctatagcttcaactggttatacaattattaatggtaaatatttttattttaatactgatggtattatgcagataggagtgtttaaagtacctaatggatttgaatactttgcacctgctaatactcataataataacatagaaggtcaagctatactttaccaaaataaattcttaactttgaatggtaaaaaatattactttggtagtgactcaaaagcaattactggatggcaaaccattgatggtaaaaaatattactttaatcctaataatgctattgctgcgactcatctatgcactataaataacgacaagtattactttagttatgatggaattcttcaaaatggatatattactattgaaagaaataatttctattttgatgctaataatgaatctaaaatggtaacaggagtatttaaaggacctaatggatttgagtattttgcacctgctaatactcataataataacatagaaggtcaggctatagtttaccagaataaattcttaactttgaatggcaaaaaatattattttgataatgactcaaaagcagttactggatggcaaactattgatagtaaaaaatattactttaatcttaacactgctgttgcagttactggatggcaaactattgatggtgaaaaatattactttaatcttaacactgctgaagcagctactggatggcaaactattgatggtaaaagatactactttaatactaacacttatatagcttcaactggttatacgattattaatggtaaacatttttattttaatactgatggtattatgcagataggagtgtttaaaggacctgatggatttgaatactttgcacctgctaatactcataataataacatagaaggtcaagctatactttaccaaaataaattcttaactttgaatggtaaaaaatattactttggtagtgactcaaaagcagttaccggattgcgaactattgatggtaaaaaatattactttaatactaacactgctgttgcagttactggatggcaaactattaatggtaaaaaatactactttaatactaacacttatatagcttcaactggttatacaattattagtggtaaacatttttattttaatactgatggtattatgcagataggagtgtttaaaggacctgatggatttgaatactttgcacctgctaatacggatgctaacaacatagaaggtcaagctatacgttatcaaaatagattcctatatttacatgacaatatatattactttggcaatgattcaaaagcggctactggttgggcaactattgatggtaatagatattacttcgagcctaatacagctatgggtgcgaatggttataaaactattgataataaaaatttttactttagaaatggtttacctcagataggagtgtttaaaggacctaatggatttgaatactttgcacctgctaatacggatgctaacaatatagatggtcaagctatacgttatcaaaatagattcctacatttacttggaaaaatatattactttggtaataactcaaaagcagttactggatggcaaactattaatagtaaagtatattactttatgcctgatactgctatggctgcagctggtggacttttcgagattgatggtgttatatatttctttggtgttgatggagtaaaagcccctgggatatatggctaaaatatatgtttgacaaaaaattattcctgtgatactcagaaattatttttatataataaatattgagatttaattaaaagtcatgtgttattgtaatacatgacttttagttaaaatttttctatcatttaataatctattattcttgactattttataataaaattcatatatggaaatattaatactaaataattaatagttgatagaaaatagataatatgctaaaagcaaaaactaatttagagccttgtaactgtttatttgcaattataaaaacatctttaaacatattgactataatataaaatattaactataatacaaaacaatattaattaattttctctacagctatccctggtatggttatttttccacccatagttgattcataagttatagttccagcacttatacctcttatagttatgtaatcatcctctaacactcttgaaggagttattgattttttataactacatagtacgaccttatcataatttccagacacagctaatcttatttgcacctcatcaccatcttcaataacttgaataaccttaccttcaaattttacctttttgtacttataatcatcaggtgttctagctaattggtcataagtaataccagtatcatatcctttcttctcttcttcttcttttttacgttgttcttcagcctttttagcttcttcagctttacgttgattttcagcttcaatagctttcttttcgtcgtctttcattttgaaccatggttcagcatcagacaatttgctatttaaagtttctatttctgttttttgagaatctataactgatgtttgattagaaatgacctcctcatggtcttcagaacaagctggtgaggatatattgccaaaaaacacaccaaaataaatgccagtagagcaatatcctttgtgctcttaaagaatttaattattttcttagagcttccttttctttcattactaaattcgttaccctcattttttttagaaaacataatacaatctcccttttattagatatattttattttaaaatttaaaaacttaaaataactagttgactaaaaattatatattcatattttcctaaaatatatttcccctaagcataattttacaaaataaatcaagaagattcaatatattttgaaaaatgaggtaaaaatgtcagattataatataattttcttgaaggtgaattttatatattaaatgaaacataaagtattttatttgtataaaactatattatgatgtaattaaatgattcagtactttagaggtggtaaaatatagatagatgaaagagcataaataaagtgatataataaaaaattaaatattaactataataaaaaaatatctggtactaagtataatacaaaaataatatatcagaaagaaggtgaagtatgggagaactacaaaaaattccaggggtagggaaagcaacagaaaaatctttaatcatgttaggatatacaactattaaatcacttaaagatgcaaacccagcacaaatgtatgaaaaggaatgtttaatgcgtggacagcacatagacagatgtcagttatatgtatacagatgtgcagtatattttgcatcaactgaaaatccagaaccagaaaaattaaagtggtggtattggaaagattaaaaaatcaaaaaagttagatataaaaaagagttgaatatccgtttaaataataaaaactaatactcaactcttttttagtcgtaaattttatgtaaatctatttgtatggctaaatatacccatcaataaatgtataaatataccaatcaataaatgactaaacatactacctaacaaaggattaaataaattacttaacaaagcattctaaaacaattaattagaaactgtttcttcaagccattttctacattgcccaatatttaccatagggtcaaagccttggtcttttcccttatttaaaagcatatcacaagggaaagtatcacattcaccacaatgattaagttccttactttcacagcaagttttaaccttacattctccaccccaaaatggtttttccatagttgggcaaccagtgcaatttacttgttctttttttgtacaactgtcacaacagacaccacatcttgattcaaacatgttcaaacatcctttccattatttaaaaatattataaaatgattttagatgactacaaaagtgcaaatagttgattttaagtcatctaaatgttaaacataaaattattaatactggtaaatttataaaaactattccaaaaatatttttgaatatttcaaaacacaataaattacttcaaatccctttgaatattccataacactatagattactttaaatccccttgaatatatttcacagcattatagattgctttaaatctctttgaatatttcataacactatagattactttaaatctctttgaatattctacaagactatagattagtttaaattcctttgaatatttcataacatcataaattagtttaaatctctttgaatattctacaagactatagattagtttaaatccctttgaatatttcataacactatagattactttaaatttctttgaatattctacaagactatagattagtttaaatccctttgaatatttcataacaccatagattactttaaatccctttgaatattctataacactataaattacttttaacttttatataaccataaagtttttatctggcactttaaatggagtttttatatcaaatttgccttccatcgaataaccaaacttaatttaattacacattccaagagtcaaatattcattcaatatatttgataattctatgttatagccataattaaatatagattattaaagttaaatatttatttaatgtattgaatgattttttagctatatttaattaagtttcattatataatataaaaattgtttttgcattaagttttaatataacacataataattttaaataataacattattatatatttttttattttaggagtatatctattatatagtgagtagataaaacatataaaattcaaataaaagatatatatttttaaataaaagggatataaatttcaaaccaaaaagaatataaatttcaaaccaaaaaatatctagcatttaccattaagaaataacatcattctttctaaaatttctattggcaatttcagaaaatactatagtagtaataaatgcaacacatattgtaactatagtgtcattaacatttaaagcagattgctttataacccccatagcactacctaacatagaataagggaaaaatataccaacagcaggttttgctactattaatcccataccaaatagagaaaggcaaagactaataccaataggagttgcaaaacttctaatctttatagacatgtataattgtatagaagctattgaaatagaaataatccaacctttagcaatccaaccagtcaattctttaggtacactaccagaaaaaccaaacatatttcctgcaactatataaaagataacaaagaaaacttgtgtaatagctgtaagtattgaaactactgtaagtttagataaaaagatattttttaaattaactggcagtgtcattacattattccaattatgattcatatgttcaagcctacaaatatatgcacaaaagattgcgattaagataggaaagaaaaattccccataaaaaagactaacttgagtccataagctgtaccattcttttttgagtatgccttgatttagataaaaattaccagaaccaatcaacacacttataagtggcaaagctaataatacataccatataaaagaattttttaactttagaatttctcccaaaactgacttccttaacatttaaatccctcctatacttctttttttaataaatgatttcttccaatataataaattagcattccaattaagaaaactaaaatcgtaatagaaaaattcatatcaattctatagacagatgaacctaaaacattatcataagcataacttaaaggtgataactctaggtaataagaccatataaacaatctacgaataccttgataaaacaaacctgatgtcaaacctataaaactaccaatcatgccaaatgtaattgcaatcatttgatttggaattacagttgcaatccataggtgtagtgcaatgatagcaatacttacaagaattgttcctaatgtgtattttaaaagtaaagatacagaaattgactcaataacccctctaaaatgtccaaacaacacaatagataacacttgcatcaatataggtatagataccaaaatagcagaacataaaaatttggataaataaatactatttaaagatgtcacagaagattttaaaagcttccatgtatctcctttatgttctatatcgcttatgcgtgatgtaattattgatattaagataggaaagaatagaccatttaaacttgcaaaactcataagcatataggaatattcaaatccacctaacatatctggattacgtgtaatagccctatttgaatttacgatacaccacattatttcaacagctacaaataaaaaggtcatcagaataatcttctttcttttaagtttataaaattctagaccaaggtatttcattataaagtcaccgccttaccagtaagttctaggaatatatcttccaagctttttttatgttcttctattctaaatacatctatatttgaatggacaagcataccatttattttagccacatctgagtcttttaaattttcaatagtcaagtacccattttgtataagtgacatatatcctttagtatttaatagcttttgtgcagatacaacattcttagctttgatagcaatctgactttgacctctattatgaagttcttttatgctatcttgaaaaaccagttcgccatgatttattattcctattgatgtggcaatttggtcaatttcacttaaaagatggctagagattagaacagtcatgccgtatttttctggtagagattttattaattctctaatttcctcaatccctgctgggtcgagtccatttgtaggttcatcaagtattaataatttgggaaacttcattattgccatagcaatgccaagacgttgcttcatacctaaagaatattgattaacttttttatttttttgattttctaaccttacaatttttaatgcttcatttacattttttttaggtaaatctaagagtctttgcattatggtcatgttttcaagccctgtaagatgaccatagtatgatggagattctatcaaagaacctatatcttttaaaattgatattctatttttttcatttaactctttacctaaaatattaatatttccttgtgtgggtttagcaagtccaagaagcattttaagagtggtagattttccagctccattaggacccaaaaaaccatatacagctccttgtggaactcttaggtctatatcctttactctaaatattttattgtattcctttgaaagtctttgtgttctaattatcatttccatatgtttcatccccttttttaatctgtgcttattgattcttttaacttatatcagtataataacttggttacatttcagttagctgaagtttaccttacaataaccttaaaagtctatttaggcaaagttgtgaaaatgggtatatggtatactaaaggagggtgatgattatggagtcaataaaagataaaaaaatacttgtggttgatgaccacaaggaattattaaaaatgatagatgaaatcctaagaaaagagggatttagtagagtatttttagcatcaagttatgaagaagctgttagggtatttagaaatgtaaagccagattgtgcaattttagatgttgtattgccagatggagatggtttctctattatgagaaaaattagagagacatctaagataccagttatttttctctctgcaagaggtgaagatgaagatagattgattggtttgggattaggggctgacgattatatagtaaagccatttttaccaaaggaacttactttaaggcttgtgggtatattaaatcgtgtatatgtgcctatagaagaagaggagttgccagtatttaaactgggagattctgttgttgtgaatttaaatagtgcatgtgttgagaaagatgggcaagagatttctttaacagctaaagagcattcgttgcttttaaagttgtatgaaaataaagggagaattgttactaatgattcactatgtcaagccatttggggagatgatatgtatggatatgaaaatacccttatggttcatgttagaagggttagagagaagatagaaaaaactccatctacacctaaacatcttattacagtaagaggtcttggatataagttgatgattaattaattttagatattagaataaaagaaatcaagaggagtgatttaattttggatagtgtaaagtacatattgaggcgatttataggttcaagtatcttgatttcattactttttattgtattaaatatagcaggttttcttctgttttcatatatgctatttgtatctaaatactctgataatttagatacaagtgatagcagagaaataaaatcaaacttgattatgattgaagataatttgattttaaaagatggaaagtttattttagatgattctagtaaggaagtactacataaaaataaagtttgggcaatgttaattgataacaatggagatagaatatggggatttgatttaccaaaagaaattccaagtcattatactttgacagatgtagcaaagttttcaaggttctttttaaaggactatcctgtgtatgtatgggaacatccaaatggaatattagtaacaggttatccaaaggacaaatacactaaatttaaccttacttatacgattaaggaaatagaacaatttcctatgttaataataggtatgtttctggttaatgcaatagttacttttttaatagctctattcataggtttaaaaatggtgaaatctataaaaccaattattactggcataaagcttatgtcaaaaggagaaccagtacttttacaagaaaaaggaatactaagtgatatttcaaaatctattaatactgtatctaaagagttgcaaatgaaagatgaaaaacttaggaagaaagaggaagctaggtctaactggattgcaggaatatctcatgatataagaactccactttcaatgataattggatatgctggagaacttgaagaaagcagtagcctttcaaatagagaacaagagcaagtgtctattatatgcaatcaaggggttaaaatcagagaattagtaaatgacctaaatttagtatctaaacttgaatataatatgcaagcattgaattgtgataagattagagtttctgcgtttttgagagagcttatttctgagtttataaataataatttggataatgacttttatgttgaacttgatatactaaatgaagatattattatagatgcagataaaaaattattaaaaagggctattagtaatttaatacaaaatagtataactcataaccaacaaggatgtaatataagggttacctctaagtctgatttagatttttgctatataattgttgaagatgatggaaaaggtatgagtcaagaaagaattaatagtttattaaagagccaaaatggactaagtgaggcatatgccaaaggtcaaaatcatggtctaggtattttgatagtagctggaattattaatgcacatagaggtaaattagatattatgagtattgatagtcagggactaaaaacaatactaaaattacctctaattaagtgatattttataaaataataacagataagaatgaagaatgaagaatgaaaatattttgaaaataattttattctttattgacaaaataactctattagagtagaataaggataaattcttttcttgtcaagttttattaaagtaaagagtaacttgtgctttatgcgcttatggctgagttactcatggtatcaaaattttcatagaaataatattttggaattattgtaaggttattaaattctttagataattccattttttttattttttagttaatatttaattttattattgacaaaaaaattctactaaaatagaattatggtatagtgttttttaattttaagaaaaaatataatgacatcctaaaaaagttttaattatacgttgttctgtgtagttataatagcttctatgtaactattgtaagtatattttattataattatttatttaaagtacgataaatgttttaaattgaagtattttgcaccattgagttctactaaagtagagtttttgtgtagtatttttagaaataacatatatatatatgtatttatgttgaaatatatgggaaatttataatataattaatgaaaaaatttaaattttgtaatatataaataaaaaaactctaaaatagaaggatataattatatagaatgtttcaattaaacaaggcaaaaactataatcttaaaattaaaattaacattattcttaagaagtaagaaatttaagaagtaaaaagtttagtgataagtggtagtaagcaagaaatttagaaagtaggaagtttagtgataagtggtagtaagcgagaaatttagaaagtgggaagtttagtaataatttgtagcaagtaagaaatttaggaagtaggaagtttagtaataatttgtagcaagtaagaaatttagggagtaggaagtttagtagtaataatttgtagcaagtaagaaatttagggagtaggaagtttagtaataatttgtagtaagtaagaaatttagaaagtaggaaatttagtaataatttatagtaagtaagaaatttagaaagtaggaagtttagtaataatttatagcaagtaagaaatttagaaagtaggaagtttagtagtaatttatagtaagtaagaaatttagtaagtgagaagtttagttataatttatagtaagtaagaaatttagtaagtgagaagttcagtaataagttgtagtaaatgaaaagtttaggaagtaggaagttcagtaataagttgtagtaaataaaaaatttaggaagtaggatttactgaaatacaaatatttaaaatcaaagagtttaaaagaaaggagagctactggacaagtatccaaaatagatagctgagtacaaaatatctcataaaattaagcaatataatacaagagaattttgacattatttatatatatttaccgtgtacaaatagctaaatttaggattaagattgaaaaatatcttataagtctgagcttatataaatccgtataagatgtatttaatcgaaaaattttattatggatattgcttgtctatattctgagtagcaaggttttatcatgactataaaaaagttgccacaatcagaattaaagataatgaaatttatatggaaatcagattccaaagtaacatctagagatattgttttaggaatggagcaaaaatatcaatggaaacaaacgacaactttgactcttttatctagattagtagtaaaaagatttctaaattctcaaaagatagataaatatacacattatgaagttttaattaaagaaaaggaatacataggagttgagacaagagatttttttagaaatattcatgattcttctataaaaagtttattgttgtcattacatgaaaatattaatttgagcaaagatgatatcttacttattgaagagtggataaaaaatctaaaagaagaggagaaagacgtataagcaaacgtatttcttatagcattaatataaagtgtatgtaagtgtatttatgtaatatattagtctacttaagtaatatgacaaatgattataagtggattatgatactataatgtgaatctaaataaattaaatataaattgatagtggatattctatttaattaaatttaaaaagctacctttacttataagtataattaaggtagctttttaaatagaggtagtgtgattaaagagaatttttaaatataaattgtgaagctttaatatagatgacaatatatattttgcaaatatgacacagtgttttcgtatttaagatgataaaataaataggaattaatgaagatatttaaaaaataaaaataaagaattaatagaagatattaaagagatagagataaaagtgttaatagaagatattgaaaaagtaaaaataaaggattaatagaagatactgaagaggtagaaacaaaagtgttaatagaagatattgaaaaaataaaaacaaaagattaataaaaggtactgaagagatagagataaaagtgttaatagaagatattgaaaaataaaaataaaagattgatataatatactgaagaggtagaaacaaaagtgttaatagaagatactaaaaaagtaaaaataaaggactaataaaaggtactgaagagatagagaaaaaaatgttaatagaagatactgaaaaaatagaaataaaaaattaggaggaaaatttatgaaatatcaggtttcattattagcagtgaaggatattgaagtatcaaaaaaattttacaaagaattatttgagcaagaaattgaattggacttaggcaaaaatgtaacatttaaaggaggatttgctatacaagaagacttcgcatggcttacagggattaatccagatacaattatacaaaaatcaaataatatggaactttattttgaggttgatgattttgacgaatttattgaaaaactcaattattataaagatgtagagtttgtccataagccactaaaacatgaatggcaacaaagagtagtgcgtatttatgacccagataagcatattattgagataggagagtctatggaagttatagctagaagatatttatctgagggatactctgtagaagaaacttctaaaataattcaacatccaattgaatttgtaaagcagtgtgaaaatagtaaggaatgattgtttaaattataattatttagtagaaattaattgtagtggaactaattcaagataatatataggactagtatttgacaaatgtcataaattaaattaaaataaagaaaatattaataaagaaaaataaggggaatattaataaagaaaaaataaatataatattaaaatatattaataaatttgaatatttataatatttttaatttgaagtaggaatacttaaacgtataaagtttattatcggaaatttctatattaatatgtagtaattcaatattattataaaggagtggttattattaaggcaattgaactttataaaaaattagatttagaatttaatattaaaaatattaatgatgattggagttttatgaattttgaaaatgattttatcactccagaatttagaaaaaagtacatatgattagtattagataatgctcaaaatattaataaagtatacacaactacttttcctgataaagaaataattaagcaagttatagataaagatgaaaaagatattttaattttttcacatcacgcaatgggatacatagcatcagatgaaggttttccatttcacgacataccactatcttatatggaagagatgaaaaatcgtagaatttctttttatgtattacattctccactagacaactatagtgactattcaacttctgttagttttgcaaaagctatgggtttagaaatagtcaaaccattttgtaaatatgacgataaaattgaggtaggagttatatgtaaaacatcactaaaatcaatagaagagattaaggaattaattaaaaaatctgttggtcatgatgtgaaattgtatgattatggagattctgtattaaaagatggtttagttgctattgcagcagggggaggaagttatccatttgtagcaagagaagttgctgaacttggtataaatctatatattactgggtttactaagcctttaaaacattttgaaccagtattagagttccatcaaatagcaaaagataatttaattaatgttataggtgctactcattattctacagaaaaatttgcgtgtatgggcatggttgattattttaaaaatctaggtttagaatcagagtttttgcaaggaaaatattacttagaggatttataggacatattaaacaataaaaataaacagttagtaaaaatttattttactaactgtttatttttttacctatttatccagtgttttgaaaaaatctatctttattttttaaactaagaaaatagacttttaattgttgattagaagatttagttttgatgtcttttaaattatttttcgatattttttagtttattttttgatgtattttagattattatttaggattgattagaatttataaatatttattttagattattgtaaatatttatttaaaaaaaatagaattattatatttatgataataaatggtataataaaaggtaaagtgtcaaatatgcactaaattaaataagttaattagtatataggttaaagtggaagtaattaaaacttattaagtattagaaaatgacttcttattagagtaagtatctaaaatgatataaaaattatgattactcattaaagtgactattatagagtagataaaattgcccataaaaatagctataatagagtggataagattactcattaaagcaattactatagagtagataaaattactcactaaaataactataatagagtggataagattattcattaaagcgattactgtggagtagataaaattactcactaaaataactataatagagtagataagatactcattaaggtgattattgtagagtagataaaattacccatcaaagttaattatcacatattagataagattattcattaaagttactatcacagagtggataaaattacacattaaaattgtctgttaaagaatgaataaaaaagagattgctcaatataagaagcatataaaaaatcaaacatataaaatttaataaataataactgatagggaaaggaaagatagaatgatatttacaaaaagcaataaatacgataaggactttctcatgaaaaatatgatgggacctaattgtataaaaatattggaagaattaacaagtaagataaaactagaaaagggaatgcgtattttagacttaggttgtggtaagggtatatcttcgatatttttagcaaaggaatttgatgctactgtatttgcaacagatttatggatagaaccaactgaaaactataaaagatttaaagagtttaaattggatgataaaatatttccaatacaggcagaggcacatgaactaccttatgcagaaggtttctttgatgcggtgataagtatcgattcttatcactattttggaaacaaagaaggatttttagacaatcatatatcacctcttgtaaaagaggggggaatacttgctatggcaatgcctggattaaaagaagattttgtggattgtataccagatgaactcattccattttggcaagataatatgaacttccattcaattacatggtggaataaactttggtctgaatcggagtctgtgattgtagagaaatgtgaagctttaaattgtcatgatgaagcttggaaggattggataaattgtgataattcatatgctataaatgacaaaaaaatgatggaagtagagaatggaaagtattttaatacaatttctttgatagcgagaactaaataattgtgatgaatttataaaagtataagataagtagaaatataagttgaatgagagtataagaagcatagaaatataagttgaattaaagtagaaggtaaataaaaatgtaagttaaataaagagtttatacaaaaatgattttttagattatttatacccaatcgagttgcttaggtcagttgggtatttttatttttttaaagttaaattgcaaatactattgtgtgatatatattttaatactaaatgtttgttttataagaaataaactaatagaaaaaatagttttaacaatgaaagcaaaaaaggtattgatgaagattaaaaattttatagtaccattttatatatttttttatatattttattatactttaaatcaaatttcaaaatgattaagtatatatacccaaaagattaaagaactatatttattatactattaaaaattattttaatagagatacaagagatagatatattggttttaattttatagaaatatacaaagatattttaagctaatatatagtaatttatatagcattataaactagaatcatataaaataagttaactacaatcataaattaaaaaggagaaatgttaagttgatagaaggaataaaatttataaaggcagaagaaaagtatatttattcgtattggcaaacttttgataaaatagcaaaagagaggaaatatctagctatggatgaagcctttccttttgaagaaacagttgaatttataaaaaatactataaataaaaacttaccacaactgtttataattgatttagaatcagataactgtattggttggtgtgacgttttacctaaaactgaaaaagttggttatttaggcatgggtattcttaaagagtatagggaaaaaggtatcggaagtagtcttttaaaacaaattattgatttatcaaaagaatatgggtatgaaaaaattgagcttgatgtatttaaaagtaatagtagagctattcatgtttataaatctttagggtttgtagaggtaaatacaatatctagtggttttacatggaatgatagacctgtaaaagaagaagtaattcaaatggagcttacacttatataaaataaagttaaagtctttaaaattccatatacacttgtataaaataaagttaaagcccttaaaattccatataaaagaaatatttttaagggctttttaataatggttcttttgaaggtagctaaatatctaaaattttatatattaaatttaaagaaaatataaagatggaagatacaaccatgtttactaataaaaaaattaaagtcataaataataaactcataaacaacttattattacttatgtttattttgcatctattacttcatgagccattttaactaagtcattcatagataaatttgagtcttgaactgtaaaagaatagtaaactccatcttgtttccatgtcaaaaacttaaattcattaacttcaactttgtctgattcattatttggccctacactaaatgtgtatttgcctgatttttcatcaattttatcctgttctgtcattttataaccttctggtacaaacttttgtgcgaatgcttcataagaaatattaatatctttgtaagtatctacaacttttagattgtcagaactcttctcaagtacattatttgctgtgtcaagagatatttcatcattgccatttttatattcaaaactaagtgcttttgattttcctaaaacattattttctttgtcaagtgcttttttatttacagtatatgctcctttaaatttatatccattactaaattcagaaactatattaggggtaaagttaaagtctttttttacttgttctgtagttgggatagatgtataggtagccttagtacttgattttccaactaaactatatatatgtcctactgcaagggctgttgtgctcaatatcaaagtaatggctaaagttgcaactaagccttttctaaatggtaatttgtgtgttttattattaatcattttataattttcctctctttctggtaaactatttagtgttttacttaaactattatgaaaactttctggaacttctggaaacgaattatttaatatatttttattcatatgattacctccgtgttttctaatttagtttttaataatgttcttcctcttgataatctactttttacagttccttgaggtatatctaatatttccttaacctcatctactgaataaccttcaatatagtaaaggactattggaattttaatttttttaggtagactttgaatagcagtatacaaatcgctatagtcatctttttcatcaatttttttgtttttgaagacatcttcaaatgatagagattttaatcgtttgcgtcttaatgaattacattcatttatgactattctaatcagccatgttttaaagtattgttcttccttaagagaatccaacttttcatatgcttttaaaatagcattgttgacggcatcttcacagtcttggtcgtttcctagaatagacttagatactcgatacaaagtctgttctgattcaagtatattgtttgtaaatgtagttttatccaactgagttccttcccttctatgcaaatcgtagcgctacttttttgcctttcacttattagataaaattttactatagatggttcactttttttatgattatttgataaatttaagtttgaaagttttgcctattctatacaaatattctataatatatttttttctagtattttcccctcatatataaagccatgtagatatattaaactttagaagccatttatatatttagttttatagtaagtgtttatattaagtaattataaaatagtaagtatttgatgttgagtagttagaaaataatgcttttggattatttacttcatgtatagatttaaaataagttttttaattaatgactaaagataacggtattttgactaaaagtaggcttttaagaaaaaacaatgaaacttaaatgagaatcaagagttagaaatgtcattattttagatagatatgaacataaataaacttaaaaaatataaattataaaaataataatttttttaaaataacaaagttttttgattaaaagttttatattgaaatgtcaaagtaataaaataccttataagttaattacaggttaaaaaaataatatgtgaattttctgatatttactaattatcaataaagtatttaagtattaatgtttttagtgagactttaagacagataatctcctattaaagatactatatcttagataaaataaattaaaacaatataaaaacataacaagattacagaaagaaagctcataataaaacactaaaaaatttattttaaggaggaataaagtatgaagtttcaagaaatgattaatagcccaggtctttggattgtttctagttttttagtaattatttcagttgttcaagcaatcgtatttatgaaatcagcacttaaagaggcttcaaatcttggtattgaaagaaaaggaattaaagcagcaattcgctcagctagtgttacagcaattggaccctctctatctcctgttattacattattatcactggtagctgtgattggtgctcctacgacttggatgaggctttgtgatgtaggagctgccagaacagaacttggagtaatatctcttacatcaaatttatctggagtagaagtaggtagtgctgcatttggagcagaagctttttcgtatgcactatggggaatggctttaaataacttaggttggttgcttgttgtatttattttgggtcatagaatgcgtggaattgttgaaaaaatgaatgtgaaatataatcctacttgggttaaaaaactacttgcaggggctacagttggattatttgcttaccttctttcaaatcaaataaaaacattcgaaataccaaaacttacaccagcagttatttcagctatagttatgctagtattgacgactttatttaaaaagaatcaacgattacaagaattatccttaggtattgccatgttgattggtatgtttggcacacagattgtactatcatgattaaaacagataagaggtgataattatgtatgataaaaagatgataaaaatagggagaatttctataggtcttgcaattattgcaaattttattcctgcaatctatgtaggtcttcgctttggtcagatgccaatgctttctgttatattccaaatttggggattagttgctacaacttatggagtgagttggattgttcaacctatagcttattatccaacactaggagctccaggttcttatataggttggcttgcaggttctgttggagatatacgtatgcctgcagcatcaatggcacagaaaattgcaggtgtagaagcaggaactcatgagggtgaagttgtaggaacaattggtacatgttgttcaatctttgtatcagcttctatgattactatttttaccattgtaggctataaagtaattcctttgttacctgaatttattactgattcatttaattatatacttccagcattgtttggggcaatttacgttgatattgcgcgtaaagatattcgagctggtggatgtacgattgctgtagcattagctattatgtactttggtgaaaaaattggtataccaggtggattgttgacattgtttattgtgttaggtgggatacttattacaagggttttctttgtaattgatagcaataaaacgaaagaataggattgtttactaggaagaaagactagaattatttgctgagaaaaagaataggattgtttactaggaggaaagactagaattatttgctgagaaaaagaataggattgtttactaggaggaaagactagaattatttgttgagaaaaaagaataggattgtttattaagaaatatgaatataaataagtcttgaaaggagaagaagaatgtttgatgttaaaattgccaatggaataatcattgatggtacaggaaattcaagatataaaggtgatgtagggattgtaggagacaaaatcatggctattggagatctaagtcaaaaagaggctaaagagactatagacgcaactggaaaatttgtatcacctggttttatagatttccacactcattctgatttatctcttgtgtatgacaaatacacaagaagccgtatccatacaggtgtaacaacagacgttattgcaaactgtggtataggagttgctccgataagagaagagaagaagcaggagttaattgactatcttggaacgaggataattggtacaattccaataaaattgaaccttcactggaatacaatgcaggaatactttgattacttaactgaaaattctccagcagtaaatgttgtagcttatgtagcacaaggacctgtacgtatcaatgaaatgggattttcaaaggagccagctactttagagcaacttaaaaatatgaagttggaagttagaaaggctatggaagctggatgtgtagctctttcgtcaggattagtttatttaccaggagcatatacaaagaaagaagaaatggctgaattatgtaaggaattgataccatacaatggatactatatatctcatattagagatgagggtgatgaagaaatggaagctcttgatgaagcaatttatatagctaagacggcaggagttcctctacatatttctcatttaaaagtcatgggtcataagaattttggaactattgataaggtatttaaaaagctagatgaagctgaggcagatggcttggaagttacttttgattgttacccatatacagctggaatgacatctttgggtgcacttttacctccttgggcttttgaaggtggtgtagaaaacatggtaaaacgattagaagtgcaagaaaatagggacagaattataaaagagctagaggaagggattcctggatggcaatgtttctaccagttagcaggtggttgggacggtgttgtactagcctctgtaatgactgaagcaaataaatatgtagagggtaaaactttaatggaggtagctaaaatcaatggtgaaaatccatttgatacgttctttaggcttttgattgaagaaaaaagtaaaattcaagtagttgttcatacacaaggtcaagaggatacagataaggtcgtttgccatccaaagtcatgtataggttctgatagtatggacctttctacagaaggcttactttctcttggaaagcctcatccccgtgcatttggtacttttggacgaattttctcttactatgttagagaaaaaggtatgttgacttttgaggaagcagttaaaaagataacttatctttcagcaaaacgcttaggaatttataaagaaaggggtctacttaaggaaaattattttgctgacattgtggtatttgacccagatacaatagaagataaagcgacttatagtaatcctaaacagtatacagtgggagtggaatatgtattggtaaatggtaaaattgcattggcaggaggaaagcaaactgatgtatgtgctggacgtgtaattaaaaatcctcttagcatagcaaaatagaatacattaagaacttttataaaaatagtctttctttgaatattaaggaaggctatttttgttaaattaataaagattactctacttgtgttttctagagaatttaactttaagtagaaaaaacaatatattaattgtaaaatgtaattaatattaatggataagatttaaatacaaaaacttaaatacaaaaatgttttaacagatagtcataattaaaaaacttaaagtaactttttatataagatataattgattatgcaaaattttatgaagcagcaaccttgttactttaagtcaagggaggttcagaaagtgtcttaagagataatagtatctttaggaaaggagaaacgaaatgaaaatactttatgtaggaccaggcatggtaatcgacaaaatactagcagtaagtaaaaagaattttcccaatattgaagcagattttcttagatatgatagatatattgaagtacctgatttattggaaaaatatagaggtagagtagatgcagttctttttacaggtaaatcgccatttaaattttttgaaaaaagacaaaaagattttgtgttgtctgattatattcctagacatgaaacaacattatacagagtattgcttgaaattacatatttgcttaaattcgatattagtagacttagtatagatacttatgataaagctatgctgaagagattgtataaagaaattggagttgaatttaaggatgaacatatgttttttgcagagcaaaagtatttagaagaggactacataaagtttgtgcttgaatttcataaatataattatcaaaataatgacatatgttgttgtattacaggtcttgaagaagcatatcatgcaatgaaaaaagagaatattccagtagttttagccttgccttctgaggatgtaatggtacaaagtataaaaaacattcagatgcgttatattgcaaagaaaaacaatgagaatcagattgttgttcttgctatcaaacttaatatgccttcagaatattcactgatgaaggaagatgagtacgcttatctttcacaaaggattaagattcttgataaactataccatttcaatagccgtatagatggtgttttggtagagcagagtagaagcgaatttatgatttttacaactaaaaaaatacttgagttagaaacaaagaagtacagagatatttatttgttggatatgattcgtgaagtttcagttataaacacttatataggaattggttatggaaaaacagcaaatgaagctaaatttaacgcttatgagagtattaagatggctcaaagtcaaaaaaatgatgcagcatatgtagtttttgaaaatggagaaattatgggaccactaaagccaaatcctgctgtcaaagagaaaaatagctttgatgaacgattttatcaaattgctacagagacagggctaagtgctaatactgtatataaagtgttcaataaaataataaatagtggaaaaactgaatttacatcaaaggaattagctattatatgtggtgtaagtattagaactatggacaggattatacttagattgtgtgattctggttattgtgaggtagtgagtgaacagcttatgagcaagtatggtagacccagtagaatattacgttttaaaccttttctgttgttttaaatagatataagttaaaaattaaatttttatgataacattttctttacaattttttagatatatgttaatatttagaaaaatgcatatgtattcataaaataaactcaaaatagctaaaaaatcattaaaaaggaaatcgtatgcataaaatgagaaagttaatttataacttaaataaatctgggaggagataattatgggaaaatatcaggattcaaaaaaagttgtaagaaattattttgaagcattagaaaatgctactggggatgaggttgaaaatgtcttaaagcaacatatgaaatcagattataactggaaaggtgtgtatccatttcgtgaacaagaaggcactgaaaatgtagcagatgtattttggaagcctttaaaaaaatcattgagtaatatgcaaagacgacaagatattttcattgcaggaacaaatgagattgacaatagtgaatgggtaatgagtatggggcattttatgggactttttgataaggattggcttggcattaaacatactcgtaaaatgattagtttaagatatgcagaatttaactgtgttcaagatggtaaaattgctaaaactggattatttgtagatataattgggtttatgattcaagcaggagttaatccattgccaccacaaacaggttcatattttgtatatccagggccaattgaccataatggattactttttgaagatgcagatgaagttgaaggagtaaaaactttagcattagtaaataaaatggtagatgatttatctgaattaaatgaaagtggtactatgggatgcccaccagaaatacttaaaaaatcttgggctaaagatatgatttggtatggtccaggtggaattggtgcttcttatactatacctagatatcaagagcaacaccagctaccatttagaaataatttaaaaggaaagactttcaatgggcatgtatgtagatttgcagaaggtaattttgcttgtttctttggatggcctaatctgactaatgtaccatgtggaggttttttaggattaccaggtggagaggttaaagcagatatgcaagttgttgatgtttattatcgtaagggcgataaacttcaagaaaactgggtgttaattgatattccttattggttgaaacaacaagggcttgatattcttgagagaactaaaagtatttttaatgcttagttatgcatacgtattctaaaacaaagggggatataaagtggcatctaccaacaaaaataatgtaacaagtaaagaggaagaaaaagaagtttctacaagtgggcttgaatcatgtacggttaaagaaaacaaagctaaaatgaatcaaactaattttagtaatataaatgaaaatcaaacaaatgagaataaaacgaacacatataaaggaaatatagataaaataaacacaaataaatccgacataaataaagttaacatagatacagtggatacagataaattaaatacaaatactcttactgaaaaaaataaaaaagttatatttaagggggaagataatatgtcatctacaaaaatttactatggagattcattagaagtaacgcctgttggagtaatggattacaatgatttttcaaaacagacaaaaagggaacaggaaatacctggatttgattctaagtatagagattttgtagattatattatgaagattacacataatatctgggaagaaaaaggtataggtgttatttatgatacatatcacaataatgttacaatgcattgtggctcttcaaatttagttggtattaaagatgttatttccaatactcttcaaacattacatgcgtttcctgatagaagattaattggtcaaaatgtaatatggtctaactttggtgctgatggttttttatcttctcaccgtgttttgtctacagcaactaacttaggtgatagtaattttggaccagcaacaggtagaaaaataaactttagaactgtaattgattgtgccacaactaacaatagaatccacgaagaatggttggttagagataatttatggattgttactcaattaggattaaaccctcaggaagtagcaaagagtatggcaaaggcaagtgaatctaaagtgcttagcttacaatcaacttatggtatctgtgaatctatggatggtcaatttatgccaactaagtatcaagcaaaagatgattctgttggcgaaatgatgcttgaaatgacaagccgtatttataattataaatatataaatgaagttaaaaaatactatcatgataatgcagtagtacattttatatgtgataaagatttaaatggttatgatgagattcaaggaatgattgtaagtttacttgcatcaattccaaatggaagttatgaagtggaaagagtaacttgtaatcaaagagaaaaaaatgaaggttatgatgtatctataagatggagattacgtggaataaatgaaggtataggattttttggacagccttctggaaagcatatagaagtaatgggaatcaatcattatcatatacttcaaggtaaagtaaaggaagagtggataacttttgatggtatggatgtattaaaacaaatgtatatgggagtagaagaataaagctgtttagagtataaataattttgaaatgtatatagggaagtattgctttataaaatttaagtggggaatgtatatgaaaaatagatgtttaaacttttagcaaaaattatgactaaatttaaaagggggaattataaaaatatgaaaacaacggttgaaatagaaaatgatatcatattaggaaaagactattcaaacctaaaaagaggaattgcatttttttcaattgctttaatatactttttttattgctacaattttatggtgggtacttttattaaaccaacaatgatttatgctttagcagatgggggatttggcttttcattaaaacaaacagaagaaatatttgcagttatgtcttttggtacaattccaggtacatttatttttggggtgatttctacaaaaattgggaagaagaggactttaattagcgttgctttactgattggattgacaacatttataccaatgttatctcctacagatattatgttatggaaaatagcacgtttgtgtacaggagtagtgttgggaggcgtatttggaacagctatgcctttagttgcagatatgtttccaagtaaatatcgtggtaagttagctgctatattaactgctttattttcattagcaatgatttttggtgggaaagtatatggcgttttaggtgatgcaaattggcaaatattgatgtatactgcgattataccacctatagttggagctatcttagcaatcttctttgtgccagatgatttggagtatacaaaggaattagttaaaaagggaaaagaaactggtgaaaagattagctatataagtatgtataagggaaaatacttatggattggattgggaacgattcttttatcaggtgcaaattttacagcatattcagcattttcaaataatgcaactacatacctagtgacaggaataggaatgtcagcagcagtggctgggtctatatatagtttacaaggaattggtcaattagtaggatatttattctggggttcaattgcagataaatttggaagaaaaataccttttataggtatggcattagcagcagtatttgtttttatatatacaaaattaggtggagataatacaacaacattctatatgatatcagtattactaggtgttgctgttggatattctggagcatggggagcatactacacagagttgtttccaagtaaatatcgttcgttgtcatctggtatgtcatttaatggaggaaggattatatctacgtttgcaatacctgctatagctggtacagcttctggtactttaggtatgatgactatcttttacatatcaatcgcagtctttgtagcaggtgctattgtatggttattcttaccagagacgttaaataataaaaaataaaatactaggaatttattttgttacttagaaaggggtggcttatgatttcatcaattgatgtatgtattataataggatatttgctattaatgttagttattggttattattcaggaaaagataataaaaatcaagaagattatttcttggcaggtaggtcaatgccatggattccaattgctttatcagttgcagctactatgattagtgcaaatggctttataggtggtcctggatgggcatatgtagatggaatgtatccagtaatgtaaaatgtgcaaaaaattcttttgtagttagtgcatttgttatgaatttagtttactactttatgctattggtaggagtaattttatttgttttttatgggggaaggacatttgaaacttcaaatgaaataatgattacttttattttaaatgaacttccagtaggagccattggaattattattgcaggtgtgtttgcagcagcaatgtctagtatcgactctatattaaacagtatgacaactgtttttacgaaggatatttatgagttttatttcaaaaaagacaacaaagaatcatcattaaaagttacaatgattataactgtagttataggagttgttatgacaggttttattattatgggatttggaggaagcatcaaatcaattcttgaccttgttggtaactatatctcatactttgctggaccagctacaggtgcatttgtactagcaatgtttacatataaagctaatgataaaggagtatctattggttttattgtagggttagttttaggattttttatttctaataaatataatgtgagttggttgtggaatccagcaataggtgctacaataacattgatatttggatatatttttagtgtcattttaaagaaaaatcataaagtagatgatattaaaaaatacactgcatttggtatgagaaatcaccttatttctcaaggaatggataaagtagatggagtatctatagtgccattttctttaggtaaacaagaactaattgtattagctttttttattatccaatatattatattatttttgatacaattttaagaagaaatactagatatttaaggagaaatactaaatgaatcaaaagaaagttcattataataaatcggctacatcaaaagatgtcgcaagattggcaggagtatctcaatcatctgtttcaagagcatttggtagtgcaaatggaaagggcgtaaaacctgaagtaagagaaagaatttttcgtgtagcaaacgaaatagggtatgttcctaatttggtagcacggggaatgattagtggaaaaactaatgttataggtttgatagttggtgatagtctaggtccattttacaatagaattatcaatttatttgtagaaaaaattcaagagataggtaaacagtgtctcgtttttaaagttcctagacaacaaagtatagatagtataatttcaaaagtaattcagtttcaagtagaagctgtgattattacagcttcggccatgaataaggtgatggctgagacttgtgaagaaaacaatattcctgtgattctttttaatcgttttatacctggtataaaaataagtacagtctatgtagacccaattgaaggtgggggcatggttgctgaatatctgcttaagaaaggtcataagaatataggatatattcaatttacgagagaaacaagtgaagaaatggaaaagaaaattggattttattctaagttaagacaaagtgggattcataaccttaaagaagaatctgcaaactatgattatgattctggatatgaagcaggtaagagaatgttagcattatcaaatcctccaacagcaattttttgcacaagtgacttgatagctattggtgtaatggatgctgcaaggtttgagtacaagttgagggtgccagaggatttatcagtgataggatatgatgatattcaaatggcttcatggaagagttataatttaacgacgattagacaaccactagatttgttgattgaaaaaacaattaacatacttaagtccttattaaatgaagaaaatccagagtcagtcgttgaaatgttaaaacctgaattgattgaaagaggttctacactttaagtgatagatatttaattaagtggtagatatttaattaagtggtagatatttaattaagtggtagatatttaattaagtggtagatatttaattaagtggtagatatttaattaagtggtagatatttaattaagtggtagatatttaattaagtggtagatatttaattaagtggtagatatttaattaagtggtagatatttaattaagtggtagatatttaatcaagtgatagatacctaattaagttgtagatatctgataagaaatttttaagttttcaatcgttctaaattgtgagtataaaaatctactaaatttagttatgtaaaatataaattataagtgtagaaactaggctactagcttttataccacttcaaacattactggaagtagttaagtttacagcagtttagttttatgtagatataatattctgtaaatagacaaaattaaaatatgtaattaaaatatgtaagtgtctcaaaatgaaatttttaatttatgaggcacttttttgtataaaatcaaatatatttttataactttaacaataaaaagaggcttatctctattttgagacagcctcaaatttttaaaactatattagtttacagcttcttttcctatcaaatcttttaactcttcatgagtcatagtttctttttcaaataagaatttagaaacagaatgtaaatcttcaagattatcctttaacatctctaaagtctctttataacaaatttcaactatacgatttgcttccttttgaaccttatcacataagaaagtcttatcatttccatcaatagtcataaatcctaagttactcataccatattcacaaaccatttggttagctatttcagtgactttctttaagtcgtcctttgcaccagtagatttatgattaaatattaattcttctgaagcctttccagcaagtaatatttttatttttccaatcaactcatccttagtataaatatatctatcttcatcaggtaattgaagaacataacctaatgcttgtcctctaggaactatagatattttttgtataggacaaattcctactatatcacttacaagagcatgtccagcttcatgatatgctactatttttttctctttttcaaccaatgcagagtttttagattctagccctgcaataactctttcaagtgccttgtcaaaatgttctgatgtaatacactcactgtcatctctaactgcaaatatagctgcttcatttgctatatttgaaagatgagccccattgaaaccatgagtttttttagctaaaagttctagatttacagatttgtctataggtttgtcatctgtatgtacctttagaatttcaaatctagtgtgatagtttggtgcacctatatgaatgtgtctgtcaaatcttcctggtctaagtaaagcttcatctaataagtcaagtctattggtagcacctattattaatacattggaatctttattaaatccatccatttcaactaaaagttggtttagtgtttggtctttttcgttgttactttcaagatgtctctttgctcctacagcatctatttcgtctataaatattatacttggagcttcttttctagctttttcaaatagagttctaactctttttgctcccacacctacatatttttcaacgaactctgaaccagtaacattgaaaaatgatgagtttgtttcaccagctacagcagatgcaagtagggttttacctgttcctggaggaccataaaataatactcctttaggtatttttgcacccattttttgatatttttgtggtgacttcataaaatcgactatttcaaatagttcttcttttacttcgtctaatccagcaacgtctctaaatgtagtctttggttttgtagaaagtgaatcatctgtttgattatctctttccatttttgtctgtgcaaagacaggagctggattgttgattttcttaaaaaagttgtttagcattttcatattcacacctcaggtaattaattattgttaatcaattttatattttccatatttactattttttattatttatttttcatggaaaaaatatacatgttatctaaataaaaataaatttgtaagatgtatgaaaaaatgaatttatgtatatagagatttctacttatgtattgaataaagtattacaaattataaattatgtattgattatatattgagtaaagtattataaagcatgtattgattaagtatttattaagtattgaataaaatattacaaatttagttgaaatgaaaatgataaaaaatgttgtgctatattttacaaatcatataaatagagaaattgttgtagcacaaagtaataggtagtatattagaatataatataggatttgttgtgtagtatagtagcatattagaatataatataggatttgttatgtagtatagtagcatattagaatataatataggatttgttatgtatatagtagcatattagaatataatgtaggatttgttatgtagaatatatagagtcatgtagaatataaatatataaaaggattttgggtataaatttaaaaattaatagcaaaatgagtagtatagacatataattagtagtaggaagtaattaaatttttcctaaacaaaaaaaatagttgcaaataatttgattaagtgatatagtaaataaggtaagaataaaacaaagaagaagtccgcttctcaccttacgccggaggttagtaaggtaaatataagttaaagcttaattttaatttaagtttgtttaaatttggtaacttatattgcggatgattacgtcatccgctttttattttataaaaattttggaggtgtcctacaattagcaaagaattagcaatcaatgaacaaataaaagataaggaaataagagtcctttcaccaacaggtgaacaacttggagtaatgcctactaaagaagctcaagcaatggctaatagcaaaaacttagatttggttcaaatctcgccgaatgcgaatccaccagtatgtaagataatggattatggaaagtttagatatgagcaagcgagaaaagagaaagaagctaagaaaaaacaaaaaactatagttgtaaaagaagtaagacttagaccaggtattgaacaaaatgatttaaatacgaaagctaataatgctataaagttccttaaaaaaggggataaagtcaaagttgaacttagatttagaggaagagaattaggacataaagacataggtaaagaagttatgcttaagtttttagatataataaaagagtttggagaaccaacaaaagcccctgcatttgagggtaataatatggttgtaattatagatccaaaaaaatagatgattaactgagaggaggaatttgtcatgcctaaaatgaaaactcatagaggtgcagcaaagagattaaagaaaacaggaactggaaagttaaagagagctaaagcttttaaaaaacatatattaactaaaaaatctgcaaaaactaaaatgaacttaagaaaatcaactttagtaagtgatggagatgccaagagaatagcacaattattaccatactaagatacagattgtaaataataactatagaagagggatataaaaggaggtcataacgatggcaagagttaaaaaagctatgaacgctcgtaaaaagcataagaaaatattaaaacttgcaaaaggattcagaggatctagaagcaaattatatagaccagcaaatacattcgtaatgaaagcattaaaaaatgcttatataggaagaaagttaaagaagagagacttcagaaaactttggatacaaagaataaatgcagctgctagaatgaatggaatatcttattcaagattaatgaatggattaaaattatctggtattgaagttaacagaaaaatgttatctgaaatggctatacaagacccagaaggatttgcaaaattagcagaagttgctaaagcaaaattagcttagtattgaatcatgagatgtaaagtctttgagttatataaataattcaaggacttttttattttttgaaaaatacttattagtgtcatgtacaaccaattttataatgataaataaaataagcaatacaatagaattttatgagatttattataagaattgttacaattatttatcatagctataaaaagtcatagtaaaaatgatattgatgtatgtttatatatgtataaagctttcaatcaatcttgaattaatattatcaacatgataatattatcttattaataatataaataagggggagataatatgaatgagaaactaatggattgttttgtaaacccaattaaatgcaagttattgcttgaagttttttcaaataatcgaactacagctaaacaattaggagaaaaatttcaagatatatcaaaggcaacactttatcgttaccttaataaaatgttgaaagatgatattataaaagtggttgaagaaaataaaataaggggaactgttgaaaaagtatatgctatgaagttagatatagctgatgatgtgaacaaaattatagatgagaactctggagaagaatatgctcaactgtttactcaatatatgatgggatttttaagagaattttatgaatacgctgaaagaaaggaaaaggatatcctaaaagagggttcaggattttctgtctgtccagtatatgctagtattgatgaaatagttgaagtgagtaaaaaaattgctagtatactagaacctctaagaaataactcgcacgaagaaggcagaagaatgcattctataggagtgataatcactccacctaaagaggatgaagggaaataaatctgatttacatgaggtagagccaatttacacggaaaatcgttttatgatttacatatgtatccagagcaaagtatctctgcatggattgtacttcattgtaccatttcatccaatgacttggagtggaacaatgaagttttttaatttttcatattaatgcctaaagaaatgaactttagaccacatatgcaattaggctacattatacaattagaccagatatacagaataaaaattagtatttttatagcagataaattgactgttattcttcttaaaaatcatctattagttattgttagcatattgaaagaaattatagtaatccattgaataaatgaatattgcccataatcatataaactgctatagtttaaaataaagcaggacgttaaattttatagtaatcttaaaatttaagagggggattttatgaaaataaaatttgttattatgccattggtgatatttttaatagtattatttgtggggtgtcaaagtacaaaagatacagaagttaaagcaaaagatacagaaattaaaatattaggtacaggtgatttgcattcaattttgacagactctatggtttcatatgtaaatgaggaaagggaaaagaataaaaatctgcttatggtagatgcgggagatttctatggtacacaaagtagagaaatgtgggaatggtcttctggaaaaaagttaattaatattaaaagaaatggtagagcagagtatgatgacataattaaaagtagtaaagatgaagtacctatagttaaagatatggcaaagttgaaatatgatgctgtagttttgggagataatgaatttatttcaaatgataagcaaagtcttgataaactagtttctgattttaaaaataataatatgccattggtatcagcaaatatatatgaacaatctggagaaaattatgtacaaccatatgtaatgaaaaatattaagacagatgagggcaatgtaaaagttggaatactaggtcttactataaaagaagtaggggaaacccttggtcttgaggattttgaaaaggataaaaaagctagagagcttggagaacaagctgattacaaaggaaaattatatgcaaatgatttagtagaagatgcaaagaaatggataaaagttatggaaaaagaaagtccagacataatagttgcagttgtacactcaggggaagaacctaaaacagatagaaatccaggaaatagaataaaagagttagcaactacagtggatggaatagatgcaattgtagctggtcatactcatgaaaaaatagatgaacacaaatataaaaataaatctggagatgaagtaattgttacacaaccaggttggcatggagatagagtatcagagattaatttcaaattaaataaagagaatggaaagtgggacataaaggaaaagtctagtaaattaaaaataattgataaagaagtaagtatagttgctactgcagatttacattcacatttctctgataaattaacagttgaccttgttaatgaacgtagtaacccaattgaacctgttgtagtagatgcaggcgacttcttagaccctcaaacagatgaaatgactcaatggtataaagagtggaaaagtataagagataataatagtgataaaacgattagtagatgcccaatggtcatggatatgaatcagggaatgtatgatgcagtagtacttggaaatcatgaatttgtatctgaaaaagatgaattttggtcagatgaacgccttttagatgctgttatagaggattttgaacaggtggcaatttctgtgttatcagcaaatatatataggcaatctggtaaaaattatgttaaaccatatattataaaagatgtggagacgagtgaaggtaatgtaaaagtaggaatattgggacttactataaaagaagtaggtaaaggtcttaaaaatgtaaacttacaagagcaatttcaatataaggataaattgtatgcaaatgatttagtggaagatgcaaagaaatgggtaaaagttatgaaaaagaaaaaaccagatataatagttgcagttgtacattcaggagaagaaccaaaaaatccaaaacacccaggaaatagaataaaagagctagcaactacagtagatggtattgatgcaattgttgctagtcatactcatgaaaaaatagatgagcatgaatataaaaataagtctggagaaaaagttatagtgacacaaccaggtgagcatggtaaatattattctaaaattacctttaaagtaaataaagaaaagggttcgtggattattaatgataaattcagtaaaacaattgaggttgaataactttataaaatttatagataaagtaaattatctgatattgacatgatatataagataaagtttctaatattagtataatgcataatgtgaaatattttaataataagagaataaacaagacaaataaaaatattttaacatgtaagatatagtatgaactattatactaatgcttactttataatttgaacatgttagaataagtcttatttgaaaattttagtgtattagagtaagtattattttaccagtaaaaaatattgagaactatatgtagatttgcttaaaaaggaatttacatatagttcttttcgtataataaatagtacaatcttatatggtaaagataaagtgtgatattaaattttattatcatccaaaatctaaggaggagtctcttatgaaaataaaatttattatagtagcatcaataatatttttaatagtattacttgtggggtgtcaaagtactaaagacacagaaatcaatgtactcgccacaagtgatttacattcaattattccagataatttaatttcctatgtagaagaggagagaaaatatgatgagaatctacttatggtagatgcaggagatttttttgacatgcaaagtggtgagatgaataagtggtttactggtcaaaaattagtaagatttaaagatgggataccagagtacaaaaaaatagctgaaccacgtgaaggagaagttccattggctaaaaaaatggcaaagctgaagtatgatgcagttacatttgggaatcatgaatttgtatctaatgacaagcagagccttgataaattggtttctgattttaaaaataacaatataccattagtatcagcaaacgtatatgaacaatctggagaaaactacgtaaagccatatgtaatgaaaaatataaatactgacaagggaactgtaaaggttggtatacttggtctgactataaaagaagtaggggaacgttcaaggtttaaaagttttaaacaagataaaaaggctagagaacttggggaacaacctcaatacaaagggaaattatatgcaaatgatttagtagaagatgcaaataagtgggtaaaggttatggaaaaaaaagaaaagccagatataatagttgccattgtacattcaggtgaagagccaaaaaatcctaaaaatccaggaaatagaataaaagaactagcaacaactgtagagggaatagatgctattgtagcaggtcatacacatgaaaaaatagaacagcatacatataaaaataattctggtgaagaagtaatagtaacacagcctggagctcatggtaatagtatatcaaagattaattttaagttggataagaagaatgataagtggtttataaaagacaaatatagtgaattaaaggtttttggaaaggaagtaaatataattacaacttctggtctgaatccaaaattttcagatgaaatggcagttaatttgtttaatgaaagagatagagatgttcaacctatctttatagatactggagattttttaaatactaatacaaaagaaatgactaagtgggctaaagagtggcaatacaatgaaaataaaggcatctataaaaaaataaatgaatggccaattgtatatcttggttatgatgctgtagtacttggtagccatgaatttacagaggataaagagacttttgagggaaaaaaatctacattggattatattatagaaaactttgaagaaatgaagataccagtattatcagctaatatatatgatgaatctggagaaaattatgtaaaaccttatataattcataatgtagaaactagggaaggaaatataaaggttggagtattaggtcttactactactgataaggatgaagaagacttaagtagctcaagcttaagcaaagactcaaagacttcgaaaattcctgaagaaacaggaaagttatatactaataatctagtaaaagatgcaagcgaatgggtaaaagttatgcaaaaggaaagtcctgatgtgattgttgcagttgtacattcagataataatagtactctaaaaaatccaagtagtgaagtcaaaaaacttgcaatgtcagtagatggaatagatgctattgttgtaggtcatacgaaaaataaggtagaagaacatatttacaaaaataagtctggagatgaggttatagtaacacaatctggagaagattgttattcaaaaataagtcttgaactaagaaaagaaaatggcaagtggaatatcataaacaaatatagtaaagcaataaaaatgaagtgaatttattgatatataaaccattattaacactgatttttataatataataaatactgattctacaatataattaacactacttttttaaatataatcaatactgattctacaatattattaatactactttttataatataatcaatactactttttacaatataatcaatactgattctataatataattaacactactttttaaatataatcaatactgattctataatattaacactattttttatgctatataacaattattgaaaatgatataaatataatatctcaaatgatatgaatataacatctgaatagagggtgttttatttgtaaaaaataagtttacagtttgagcgtataaacttatggtaaaggagaataattatgaattataagaagattgcaattataacgggtgctaatagtggttttggtaaagagtttctaaagttattaataaatgaagaagaaataacagaaatatgggcagttgcaagaaacaaggcgagattaaatcaattagtagatgaatttggaagtaaggtaaaagttttttcaaaagatttatcaaaaatagaagaagtaaaagaaattggtacatttttaagtaaagaaaatgtatgtataaaataccttataaacaatgctggttttgcaaaattctgttcatacaatgatttaagtatagatgaatctattaatatgattgatttaaatattagtgctgttgtagtattgggacttatatgtattccatatatgcaaaagggaagccatattatgaatatttcttcacaagcatcattccagccattgccatatcaaaatatttatagttcaactaaagcgtttataagaaattatacaagagcattaaatgttgaacttaagagtaaagggataaatgcaattgctgtatgtccaggttggatgagtacaaatctatttaagagaggtatagttgtagctgaaaaagggacaaaaaatttcccaggcatagtgtctccagacgttgttgccaaaaaagcattgaaggatgcaaagaaaaataaggatatttctgtgtatggtataaatacaaaatccagtcatttattagcaaaactattgccacaaaaaatgatgatgaaggtttggttaatgcaacaacatattaaggaataagagtttcggtaattaagtatcagttggagattcaatctattatatattataagaagttttgttgagcaaataataattgtgacaaaacggcttatctagtgccgataagccgtctataatgtataaaaaatatatttttgattttactttatttagatattgaagtattaaaatatgtaggacttgaaattttataaagataaatactatgatattttgtaaaaactgagatatgttgatattacatagtttaactatactgttaaattgaagttttcttattttgcattatgcttattacttaatgatttagactataatttccataccatcatatgcaaaataaatgttatcaagtttcttttctaattcactgtaataaccatatgattttccccacatttcgtcaatatgtgtaatgataatctttttaattctataatagtttttaatttcaacaatctcatctaaagtaaatatttcatctttaaatggtgtgtcttcaagttttgtaccatcatttaatataccatcatcagaaactagacttattattaaaacatcagcatcaaagtacatatcactatgagtaaatggcttgggattacagcaggcatatatgacttttttttcattctctttgataacatagaaggttatattcctgtctgggttattgttaatcaaatcaatatcaaaattatttatctttacatgcgaagtttcattaatagaaatgcaatttataacatcaccataatatttaagacaatcgagattcgttcggtttatatcttcaattacttcaggaagagcataaaagccaattggattattttctcctgtgataaagtcacatcctattttttcgacaattctaatacccttaacatggtctgggtcatggtgagaaattgaaatatgttttacttccgatattttttgtctgttacaagctactgtaatatcttcaggtgtgtctatcagcatttttatatcatcaatatataaacttggtcctaatcgttcatatcttccgcctttttgcctggcttcttcacatattttgcatttacaaaatgaacttggaataattgacataccgccactaccaacaatttttaatttcaaagttattacaccaccttctaaaaatattagattatataaataatctacaatcacaactgattaacaaaattatgagttaataaattatatcacatgtaaatatgaaagaatagtatgaaatttttataagattatattaaatatttctcaatgaaattgactttgtatatgagccgaatgactttattcaatatagataagacatttttcttgtaataagatatgattattctataaggttcatgtaattttgatataaaatattgattaataacatatatgttattggtgaacatatttctatagaatggaatatataattttttatatttatcattgtattattatacaaagaaagttaaaaagagtagagtacaaaggaattatttgtactttactctttgttttgttaaaaactaatttatattagtgattcaaatatttaactagagtataagggttgtatataatcttataagtaatttatctgacaaattaagataatatcctaatcaaattctagtcattcgaacataacatcacaagtgatttatctgacaaattaagataatatcctaattaaattgtagatatttatacataacactaaaagtaatttgtttaacaaattaagataatatcctaattaaattgtaggtatttatacataatactaaaagtaatttgtttaacaaattaaaatattatccaattaatataaaaattacttctttttaactgggaagcatacctctgttacccaattatcaggattactatcgttgccaggacttacatgataaatattaaacataggaccatccacatcatagttattatctgatatccaattaccaatagcctcacaagcgtctgcaacttgattgaaatttccattaacaattgcagttgcagcagtcacacttggaacagtcttaaatttaacatgttcagtatctttatactttccagatacagcaacttgtacttcaacatctacagaatcttctttatatccagtatcataaaagactgctttagaatactttgggggttcaatttgaacattctggtcttttgtctctaaaaatgcttgatgccataacattccttcgtcttgataagttggtataacccttctaagtgtcatcatatattttggtgcaaaattctttatagttacatcataatttttcataatatcatttcctccaattcttttaatagtggtttctatttttaatagttttttctgtgtatcttctaattgttcttttacttgagaatggtggatatttagatattttataagactttctttatcgttatattctgtcaaaatttcttttatagaatacaagccaaagcccatatcttttagtgcatggattctatttgtagtagaaagttggtctgcactatagtatctatatccattagtgttattcgtatgagaaggagttaaaagtcctatttcatcataatgacgtaacatacgaatactaattttacttagctttgaaaaatcgcctatcttaaacatgtttttgtctcctttataaaggtacttttagcttaatattaatataaaccatatcataatgttagagtcaactaaaattataattaaattatattgacatatgatgaaaaaaatattatactgaacatgttcagaacctaaaatgttaattattttggaggtctattatgaaaagtaatgataaagatgctagagaacgtataattgaagttacattgaatcttttaaatgaagtagatgatattgaggagattacagttagaaaaattgctgagcgtgcaaatgttggagttggtttaataaattatcattttaaaacaaaggataatttgttgagtactgccataggagatgtgatgtcaaatataatagcagagctatatgacgatagtgtatatactctaagacctattgaagatttgaaaaatttattaaaaaaattgtgtgatactggattacattatgaaaaagtgcttccttttgtgttgaatcaatgtataaccaatggagatatgcaagcagaacttgatattgtccctatgcttcgtaaaatttttggaaataaaaaagatgaaatgagtctaagaatcattgccctgcaaattattttaccaatacagatttctgctttatctacagaatcatttcagttatacagtggtataaatataaagaataaatatgagcgagataaattcattgatattttaatagaaaatattattggagaggatgttgatgtaagatgaaaattataactattggttcaagtcttatcactgttttactttttctttcaactatggtttgtgggttctggattaagaataataaggtaacagatgcaagttctattaagttccatatgaatagtgctatttttacagggatatttttattgatttccacaatccttttaattatatatataaaaaaataataatattattaataaataaagtatcagaaattataaagacaagagtcttaaaaatttctgatactttaccacataattttattaaacattaattgtgtgtgaaaaaatatcacttatttcaatctaatactaaatcttaagagtgagtataaagtattagaaattaagaagcattttttagttcaagtggattatctataccaaaataatcatataaagtagagcttatttcctctaaatttccatcttggaaaggtaattgtaaatttaccttttctaccacatctttaaatccagcatcagtattttgatttaaaaaatccatatatacatcaacagcttttctgtaatcttcttgtgataattgccatatctgaagtgatacatcagatgcaagaccataactcaagtaataaaaaggaacttggaagttatgagatacaagtatccaaaaaggagcatttttttctctaagtatattattggaaactccatattcttcctctaaatcaaaaaacaatttattgatatcatttagactcatatatggattcttgtatataatttcttgaaattcatcataaagacaagcatcaataatagtatttaaaacaatcgataagtgttctttttttatagcttcagattgtttaccaaaaaaatcatcaaaatatttataaaatagaatttctaaagatgttgaatgaacttcacatacatctatacttggttgcatcttattatttaagttaatactgttgtagtaattataaaaatgaccaaactcatgagcaaaactagtaacacctaaaaaagaattgtcccatgtattaaacaagaaaggtgctttatatttatttatataagtagtatatcctccaggcgatttgttttttccagaagaataatcgtacaagtcatattttttcatatagtcgaagctctcttttagttttggagatatatcttcaagtactttatcaaacttcctaaatgagcgatttttatatactttaatataaatagaagaatcagatggtttagatgaaatctctctatataatggaactatgtaatcttttacatcttgtctaaattttttagcttcttcttgagaatagtctttgtttaggttcatataggcataatctatataattcttaaatccttgcttacttgctatttcagttcttgtctgtataagttctaagaatatgttaccaaatataggattgtatttttttaagtaatctgaataaattttcacatattcttcagggctaagatttggtcttgacaaggcttcttcaaagtctacctctataccatctattgatactgtagatttagctaataagtcttcatattttacaactaggtcttgctcttttttaagtaaatcttcaacttctttagaattaagttttccaatgttctttagataattaaatgtatcctttccaagttctttttctaattctttagagaatttagaagttacaaatctatcttgaaagtctttgtatgacatgtcaacatctactgatttactcataagatacttatattccttagagtaaaattcgtctgatgaatctatgttatttctaatttttgctatagtaagtgtactgtaaaaatcctgataaattttatcaacttcattaaataaatttaattgttccttagctgttttagctgttaaaagtttgtcgttacacttgttaatgttttcgcaaattgactgtatattaggacgcttatattccattttttcaaaaggaatagttcctctaacagaatctttttttgtatcattagtataatttcttatgtatgatgcaaatataataaaaactgcaattaaaattagaaaaacaaatattttcttcttggatttaaccataaaaatcctccaatcatggatatagttattaattattttactatattaaatataaaaaatgcatgttaagaaaatttaacataaagatatagataagattataaataatataaaaaatttaacttcaaaaaagtatatgaaatttatactggtaaaatgataaataaattttaagtacaaaatagtaaaagctatgatagttttagacccattatatgtaaaaaatatagatgtttttggtgcaatttaaattaaaagatatatataaaaatttaaaatattccaaacagaaattataaaaattactatcattgtctttatgcaatatttatactataatagaataataatttagaggaaagctctaaaaataaacaaattaagggtcttaacagtagtgattttatgttaaggaggtataaagaaagttgaaaacaatagttagaagacttattctctacgcagatggaatgcgtcctactcaaataatggtatctgggtttgctgcgattattgtaatcggagcattgttgttaacactcccgatagcgtcgcagagtggagagagtataggcttattaaatgctctatttacggctacttcagcggtttgtgttactggtctagttatggtagatacagcaacttattggagtttatttggacagatagttataataacattgatacaaattggtggtcttggatttatgaccgtagccacaatgttttcacttatggcacgaaaaaaaatacaactaagagaaagattattaatacaagagtcattaaatcaagctgatttatcgggacttgtaagacttacaagatttgtattaataataaccataacaatagagggaataggtgcactggttttatcaactgtctttattccacaatttggtttgtctaaagggatatggtatagtgtatttcacgcaatatcagcgttttgtaatgccggatttgacttgatgggcagtgtaagtggcccatttacatcgttaaattcttatgtaaacaactttacagtatcaatgactgtttgcgcacttatagtgcttggagggctaggattccctgttgtacttgatattgtaagaaaaagaagattttcaaaattaaatgtgcattctaaggttgtattgttttcaactgctacacttatttttgtgggtgcattatttatttttcttatagaatttaatcaaaaagctactatggcggacttgcctttaaagggaaaagtactatcagcaatatttcaatcagtaacagcaagaactgctggttttaatacacttgatttagctactttacgagaaagtagtgtatttgtaatgataattttgatgtttattggagcatcacctgcatcaactggtgggggtataaaaacaacaacactagctgttttaatcattacagttagaagttttctatcaggaaaatcagatatagaagcttttgaaagaagattagctccatcaactataaaaaaatctcttggtatatttgtaatcagtatatcagcagttatttttggaacattgattatttcaataactcagcctaattttacattagttcaatcagcttttgaggttacatcagcacttgctacagttggttcaagtttagctggaactccaaatttaaatgctttaggtaagattataataataatctttatgtttatgggtagagttggttctcttactttatttatggctatactttctggtggtagaagaaagagtcaaccaatcagatatgcagaaggtaaaattatggttggttaagttaccaaggagtaatataaatttataatggatttagagtagcactgtaaatctgttgataaaataaatgagcctagatgtaattatatgaagaaataaaatcaactaataaacaaaattaattaatgaaataaaaaaacagggaaataaaatacaaataaaaaggtaaatcaaaattaaattaatctgtgtatataaaattatatattgtgtataagttttgtatgtgtaaagtatataagttttgtatgtgtaaacaattaatttaagagatattatataaattgtgtattagggaggaagtttcgagatgaagcaatatatagtcattgggtgtgggagatttggaagttcagttgcgtctactatgcatcttttaggacatcaagtaatggcaatagacaaaaatgaagattcagttcaaagtatatctgacaaggtaacccattcacttatagtggatgttactgatgagcaagcgttaaggtcattaggtttaggtaactttgatgtagcagtagttgcaataggttctgatataagggcatctataatggcgactcttatagccaaagaaatgggtgtagagttgataatatgtaaggcaaaggatgaattacaagctaaagtgctttataaaattggcgcagatagagttgtatttccagaaagagatatgggagtaagagttgcacacaatttagtttcggataatatattagaccatattgaacttgacccagagtattcaattgttgaaatcgtaactccaaatagttgggttggcaagacacttatagagcttgaattaagagctagatatgagataactgtacttgctataaaaacaggtaaaaatataaatgttacaccttctccagatgaggaacttacagccggaagtatcctagttataatcggtcaaaatactagtataacagcgataacatctggaaataaggggataattagaagaagataatttactatttaatatatatttaattgcaatgaaagtaaagagtatcatataattatgaatagttatatgatactatttttatttaatcgaaggtagtatttatttgtaagattagataaagagaagttaaattaaaagtaaggaggctgtgctaatataaaaatttataagttattagcatttagataaaatgattacaaatataaacagtaaggataatgaaaagttaaagtatacaagagcactattaaaatcaaagaataggaataaagagtcaaagttcataatagaaggatacagaatagtaatgcttgcacttgaatgtatggcaaaccttgattatgtatttatcaatgaagaatttgaaaataagaaagaacatgtaaaactattagaagatttggataaaaaaaacacaaagatatacaagactactaataaaaactttaaagaattagtggatacagaaaatactcaaggaataataggtgtagtttcatttaagaaaaaaaaattaagtgaaagtataaataaaaaagataaatttgtattgattttagatagaatacaagacccaggaaatatggggactataataaggactgctgattctgctggagtagatgccataatagcactaaagggatgtgtcgatatatacaacccaaaagtaattaggtctactatgggttctatttttgatatgaatataattgatgcttcacaagatgaaactgtggacatgcttaaatcattggattttaatatagtttcaagttacttaaatacagaaaatttttatgacaaaatagattatggttcaaaagtagcattggtgataggaaacgaagcaaatggaataaatgaagaacttgtatcaaagtctgatattttggttaagatacctatatatggtaaagccgagtcgttaaatgctgcgataagctctgctatactgatgtatgaaataaaaaaatacttaatttaatgtattgtaataaatataatgtcatgttataatcttgaattaaatagtagagtatcaaaaatagtcaatatatattaaaaaaataattaaattaattatatattagatgtatatcatataaaaaatgattgagttgattatgtattagatatatattatataaaaaataattgagttaattatgcattagatgtatattatataaaaaataattgagttaattatgcattagatatatattatataaaaaataattaaattaattatgtattggatatatattaaaaatagtcacataatttgaatggaaatgatataatactaaaataaacaatataatattgtaaatgcaatgaaagaggaaagtattttgattaaacttagtaaagagataaacacctaggctgggagtgttttctaagaggtcatgagaagttccctctggagtaacagagctgaaattttacagtaggctttgacgtcaaaaacgcgttaagtttgttagaggtggtttgatgatttttaaattgttaaactactagggtggtaccgcgaaactatagcctttcgtccctagacagggattgaggggctttttttatacaaaaaaacgaaagggtgatatgtgtgcaagaaaaattacttgctttacgtgaagcagctttggctgaaataaaagaagcacaaagcatagaaagtgtagaaagtttaagagttaagtacttaggaaaaaaaggtgagataactgccatacttaaagaaatgggtaaattatctgctgaagaaagaccagtagttggtaaggttgccaatgaggtaagagaaaacattgaacttagcataaattctaaaaaagaagaaataaatgctattgaaaaagaaagaaaattaaaagaggaagtgatagatgttactcaaccaggaaaagttttaaaggttgggaagaagcatccaataactcaaattatagatgaagtaacagatatatttatcggaatgggattctctatagcagaagggccagaagttgagactgttgaaaacaactttgacgcattaaacgctcctaaagaccatccatcaagagatatgagcgatacattctatatcaatgatggggtattacttagaactcaaacatctccagttcaagtaagaactatgagaagtcaagagttaccaataaaagtaattgcaccaggtagatgttttaggtcagactcgccagatgctacacactcaccaatgttccatcagatagaagggcttgttgttggaaaagatgttactatggcagaatttaaaggaactatggatatcttcgttgaaaaattgtttggttctgatatcaaaactaagtttagacctcacaacttcccatttacagaaccaagtgcagaggttgatgttacttgtttcaaatgtggtggtaaaggttgcccaatgtgtaaatatgaaggttggatagaaatattaggttcaggtatggttcatccaaatgtgcttagaaattgtggaatagacccagaagtttacagtggatttgcatttggagttggggttgaaagacttgcaatgcttaaatacgaaatagatgatattagattattattcgaaaatgatatgagattcttaaatcaattttaattaggagggtatgtagatgttagtatctttaaaatggcttagagactatgttgatatagacatggatgtaaaagagttcgctgataaaatgacaatgacaggaactaaagttgaaacaatagattattatggtgaagaaatagaaaatatattggttggaaagattttagaaataaaacaacatccaaatgctgataagttggttgtaactaaagtagatattggagataaagttgttcaaatagttacaggagctacaaatatatcagaaggagattatattccagtagctgtaaatggttctaagttacctggaggagttgaaatcaaacagactgatttcagaggtgaattatcagatggtatgatgtgttcagcagctgaactaggtatagatgaacattacattgaggagtataaaagaggtggtatatatattttagaccacgaagattcttatgaattaggaaaagatataaaagatgttttaggattaaaagatgctttaatagattttgaattaacttcaaacagacctgattgtaaatgcatgatgggtatagctagagaagcagctgcaactataggaacaaaagtaaaatatcctgaaatcgaagtaaaagaaagtgacgaagagatagatttcaaagttgagatagataatccagatttatgtagaagatatgttgctagaatggttacagatgtaaaaatagaaccttctccatattggatgcaaagaagacttacagaagcaggagtaagacctataagtaacatagtcgatataacaaacttcgtaatgttagagcttggtcaaccacttcatgcttttgatataaatcaagtagagactggaagaatagtagtaagaaatgctaaagatggagagaaacttgtaacattagatgatgttgagagaacattagataaagatatgctagttataacaaatggagaaaaatcacttggtttagctggtgtaatgggtggtgctaactcagaaataacttctaatacgaagactgtactttttgaaagtgccaatttcaaaccagaaaacataagaatgacagctaaaaaagttggtattaggtcagaagcatcttcaagaaatgaaaaagacttagaccctaatcttgcagagatagcagcaaatagagctgcacaacttgttgaaatgttaggagcaggaaaagttttaaaaggtgttgtagatgtatatccaaataaaccagaacctaaaaaattggtagtaaatcctcaaagaattaaccacctattaggtgtagatgtaccaatggagcagtttgtaggaattttagaatcattagagtttaaatgtaatttggtagctaatgataaattagaaatagatgtaccaagctttagaacagatatggaacaagaagctgatgtatgggaagaaatagctagaatttatggatttgagaatataccttctgtacaattagaaggaaatacgacagcaggaattaaaacttcaaaacaaaaattcatggatgctttaaaagataattcaactgctgtaggattaaatgaaatattaacatattcatttgtaagccctaagggagtcgataagataagagtaccagaaggtaatgctaagagaaactttgttaaattacttaacccattaggagaagaaacttctgtaatgagaactactttaataccaaatatgttagatgttttatcaactaatgtatctcataaaatagaagaagtatctgcatttgagtgtggacatatattcatcccacaagattcagaattacctaaagaagaaaatagaatgtgtgtaggtatgtatggtaaagatgttgacttctttgcactaaaaggaactatagaaactatacttgtaaatgtcggatttaaaggttatgaaattgaacctcaagataataatactaccttccaccctggtagatgtgctaaaatagtgtataataataaatatgtaggtacattaggtgaattgcatccagatgttatagaaaactacaatctaggtcaaagagtttatgtcgctgaaatagatattgactttgtatttgataattctgatagaacaaagaattatgtgccattaccaaaatatccatctacatcaagagatatagctcttattgttaaagatgatgtatttgtaaaacaaatagaagatataataaaggaaaatggtcaaggattagtagaaagctacaagttatttgatgtttacaaaggttctcaaatagaagctggatacaagtcaattgcgtattcaataacttatagaagtaaagataaaactctaacagatgaagatgtagctaaggtgcatgataagatattaagtgaattaagcgaaaaattaaatgctaacttaagatcaaattaacaactaatgtcgggggaggttaggatgaacaaagtaatggttaaaatccatggcgctgaatatccaatggttggagacaaatcagagaagtttatgattagtattgctgattttgtagacaaagaaatggataaaataacacgtcaaaacccgaaattgagcttatcagttgctgcgatactaactgcattaaatatatcagaccttttatttgaatgttcagatgagaatgagaagttgattaaagctaatgaagaattgagtaagaaggttggagcatctaatgaagagcttcaattagaaatcaagtctttaaagcttacgatagcagaaaaagaagcagaaaatcgtgaagctgagactaagatgaaagagttaattgagattatagaaaataaaaagcaagaaatattcgaacttagtaatacgacagaaggttctagagcagagttagatgtttataaaaacaagattgaggagttaagtactcaacttgaagaagcaaatgaaagagctactatagctgaaaacttagcttctgagtttcaaaacaaagcttatgatttacagttaaaatgtacagggttaaataatgatgcaaaaaatgtggaataaactaaaagatttgctgtctcttgttttttgagacagcttcttttaatgtataaatataaatgctatataaatatagctaatgtttaaatgtaaataaatataaatgctatataaatatagataatgtttaaatgtaaataaatataaatgctatatagatatagataatgtttaaatataaataaatatgaatgatatataaatacaaataatgtataaatataaatgatgtataaatatagataatatttaaatataaataatttttttatatcaatgaaaaatagaatctaaaatgattttgattttgtatctatcattagaaagcgagaggtttatatatgacaagcaagagtcagatgtctgaatcattctttttatgttctttgttggcaataacaggaggatttttggatatttatacttatgtggtaagaggtaaagtctttgctaatgcacaaactggaaatatagttttatttgggcttaatatagcagaaggtaatgtaaaggaatcattttattatttgattcctattttggcatttatgttaggtgtatttatagccgagaagataagaaagtattttacaaataataagacaaagattcattggcgtcaggttatcattataattgaaatgattacaatacttattgtttcatttattcctagaggaagatttaatatgtttgtaaatgttgctatttcttttatttgttcaatgcaagtagagagttttagaaaagtaaatgggaatagttttgcaacgacaatgtgtactggaaatttaagaagtgctacagaaactttatttcattatatacatactaagaatatttttatgataaaaaagagtttacagtattatgctattattatattctttatatctggagctattttaggaactttttttacaaaaattttcgtggaaaaatcaatactaatatgtttttttattttggcagtggtctttggaattatgtttatcaataaagatgattcatttaatgaaaattaactttctgtaaatttacaaaaaaatgaagctgttatttgatatactttatatatagcaaatattgtatagattaattaaagaatttaaaatatagtaagcaatatataagttaatagaagtattttaagtatagtaagcagtgtataaattaattaaaatgtcttaagtatagtaggcaatatatagattaatagaagtatttcaagtatagtaaacagtgtacaaattaattaaaatgttttaaatttagtaagcagtatataaattaattgaagaatttaaaatacagtaatcaatatataagttaatagaaatatactaaatatagtaaataatgtatatgttaactcaaatggaccaaatataaataactaatatataaattaattgaagaatttaaaatatagtaagaaatatataaatttaatacaaatatttaagttatagatataattatattaacctaacaagtataaatagaggagaaaaatatgaaaaaaatagaattacttgcaccagtaggctcttttgattcattaaaagcagcagttcaaaacggagcaaatgctgtgtatttaggtggtaaagactttagtgctagagcatctgcaaataactttgatagaaatgagctgattgaggctgttaaatactctcatataaggggagtgcaagtctttgttactgtaaatacattgataaaacagtatgaaatagaagattttgtagagtatgtaaaatttttatacgatatagatattgatgctttaatagtacaggatataggaatggcaagacttataaaaaaactattacctgactttgaactacatgcaagcactcaaatggtagcacattccttagaagatgtaaaataccttcagagtgtagggtttgatagagttgttttagcaagagaattaaatgttgatgagataaaatggatttgtgaaaatacaactgtagatatagaagtttttgtacatggagctttatgtgtatgttactcgggtcaatgccttatgagtagtatgataggcaataggtctggaaatagaggtaggtgtgcacagccatgtagacaaaagtatgagttgatagatataaatacaggagaagtagtaaaaagtaatggagattatttgttgagtcctagagatttaagtactatagaagatttggataaaataattgaaacaggtgtattatctttaaaaattgaagggagaatgaaaaaaccagagtatgtagctactgtggtttcaggatatagagaagcgattaatgaatttgtagataagaaaaaaataagtatttctgaggaaataataaataatttgtataccatatttaatagaaagtttacaaaaggatatatattaggtgaagttggtaaggatataatgaactctaatagacctaataatcaagggctatatattggaaaagttttagattataatagaaagaacaaaagacttagagtaatgctagaaaatacgcttaagaaaggtgatggaattaacttaggtggaggtactattggaagaataataaaggatggagagataactacaatagcacataaaggggatttgatagaattagattttgttggagaagcaaagagaaatcagcttatatataagacttctgacagcgaattaatgaatagagtacaagctacatttcagcaagataaagagttcataaaaactaatatacgtgcaaaagtgagtattaaactaggtaaaaagccagagctttttataagtgatttttgtggaaataaatcggtggtagaaggagacaaaatagttgaaaaagctataaaggtggctttaagtaaagaaaaaatagaaacacaaattcaaaagcttggaaatacaccatataagttaaaagagatagaaattgacctggatgaaggtgtaagtatgcctataagtgtgttaaatcaaatgagaagggattgtattgagcttttagatgaagaaagaataaagataaaagatagaaaatttaagaagaatagattaaaataccaaccaaatagagtaaataaacagaaaaaacttgatacagttcctaagattagagttaaagttaagaacttggagcaattagaagcagtattaaattataatgtagatttaatctattatgaagatataaatacattatcaaaagctttacaaatggcctcaagtatttctatagattcaagtatttctatagattcaagtatttctatagattcaagtatttctatggatttagatacttcttcgtctttaggtattcctaaagaactaatgggttcaaatacaaataacatagatactttgtcaaatacaagtaaaatagatactttgaataagaaccactataatacagcagtcactgacaaaaaattaatctattcagcaccaaggattgttagaaataaagagtacaagcaatttgagatattggataatataaaaggaattaataaggttcaaattggtaactggggctctatggaatactttaagaaaaaagacttaaatatagattgctacttaaatgcattcaatagtgaaagtataaaccacttcaaagaagagggagcaagtacagtttgtttgtcacaagaactaaacttaaatgaaattaaacaaactttaaaatatacagatgtagaaattgaagcagtaatatatggatatgctcctatgatggttacagaatactgtcctatgggagtagttgttagagattgtaaaaaggacaagagagttgctaaatgtaaggaaagtagttatgctttaagagactttacggatgcaagttataggataacacaagatatattctgtagaagtacaatttacaattcgaaggttacttgtatgttggacaatctatatgagttagaggaaattggaatagatgtatttaggatagattttacagttgaagatagtgagatggttaaaaaggttattgaagctcacattgaggtattgagtaataattataaacttggaaaaaaggctacagatttgtataagaaattagatgaaattggaacagttgcaggacactactataaaggtgtagaatagatataacatgaaaaatatacatgaatatatataaagacttgaatttatgtgtattaatatataaaaatatcatatatgtgaaaaaacagggggattggtgaaaatgagagaagaagctttagaaattttatttaagtatttagaaactgatagaatgagaaaacattgttatgctgttgaagctgttatgagagaattagccaaaagactagagccagaaaaagaagaagagtgggcagtggcaggtcttttacatgatttggattcagatatagttggaagaaagccaggagaaatatgtgaaggacatgctacaacaacagtagaactgcttaaaaaagaaaacttcggtgacgaagaaatgtatagagcaatacttggtcatcatgatggaatgggagttacaagaactagcttaatggaaaaagcaatatatgcagcagaccctataactgggtttataactgctatagctttagtttatccagataaaaaacttactagtgtaaagactaagtctgttattaaaagaatgaaagaaacgagatttgcttcaaatgtaaatagagatgcaatgagaagtatagaagatatagggattccatttgatgaatttgcagaactttctcttaatgcaatgaagaatataagtgatgtgcttgaaagtgctgaaaataattaattgagaatataaagagaaagtaaggcgagatacatgaaacttacaactatttgttatatagaaaaagatgacaagactttgatgttgtacagaaataaaaagaaagatgatatacatgaaggtaagtatgtaggagttggaggaaagtttgagcaaggagagactccagaagaatgtgtaattagggaagtaaaggaagagactggtcttactcttaaatcattgtcatataaagggttgataacttttccaaaatttaaagatgaagaagattggtatatgtttttgtatttctcagatgagtttgaaggtgaattgtctgaaaaagatttaaatgattgtaaagaaggaaatttaatttgggttggtaatgataaaatattcgatttaaatatgtgggaaggtgacaggttgttcttaaattgggctaagactggaaatatctttagtgcaaagattgtatatgataatgggaaactaaaagattataatgtaagtttcttagattaattaagatatagtttttagattaattaaaatgtagtttaatgatatattttaagaatataatttaaagatattacttaaaaatgtaatttaaagttacatcaaattaaaatgtaacttacaggttatagcaaattaaatttattgatataatattaaaataaacaatagtagttgggaaaaggggctatctcagtgcataaagatagccttttttagtctgtctacttaacaaggacatatccaaaatagaggtaagccttttttattgttgaaatgataaatatccacttgatttcatacaataaagaatgtctcattaactaaaaagttcacttttagacatttacttcttttatcttttattttgaataaattctaatttaagttctaattttatgtatatttttctccattaaagtgtagttaaggctagtatattgttaaaaaaataaaaattgacttagacaactatttgttttatactaaagtaaattttttaaaaggaggaataatttggaatgatagacataaatttagaaaaatgtgtaggctgtgggatgtgtgaatcagactgtcttgtaaatgcaataaaagttaaggatgataaagcaaaggttaaaaatattctctgtattaactgtggtcactgtatggcaatttgcccaacagatgcaatagaaatgcaaggatttgataaaaatgaagtaatagaatacaatcgtgaaagttttgaattagaacccgaaaagttattgaattttattaaatttagaagaagtataagacaatataaagatatagaggtagaagaagaaaaaataaaaaacatagtggaagctggtagatacacaccaacaggtggtaatagacagcctataagatacatattagtaaaagaaaagctaaaagaagtgaaagaactggcaatacaaggtctttataatttggcattagatactgatgacaatgaccctgtacgttctatctataaaaatacatttaagaaaatgtacaaaagatataaagagaacggaaatgattctttattttatgatgccccactacttatgatagttgtaggtgatatgtctctaggtggaagtgcttatgtagatggaggattggctgcatctaatatggaacttatggcctattctcaaggattaggaatttgttataatggattttttgttatggcatcaaatgtagagccaaagataaaagaactgttaggaatgagcgagaacgaagcagttatcacttcatttatattgggttatccagatgtgaaatataaaagaactgtaaatagaaacactgctaaatttgaaatgagatagaacttaaacttcattacaacttgtaaaattatgggatatagagtaggtatttagcagggtaaatttgttgtaatagatatataaatgagttataatttaaatatattgtatatattaaggatatttaaatttctaagtagatttatatatccttttatatactaatctattttttcatgtctacaagtttatgcagtaatttatactgtaaatcttaactatatggaggattgtgtagtgaatttaaaaaaattacttttattaattattgtaattacatctatattcacttcttgcatattttcttttggtatcaatgctataggtaatgataatcgtaccattcgtgttgcttatcctattcaaaaaggtttaactgaaatagatgagcaaggtaactattttgggtatacatatgaatatttgctagaaattgcacagtatactggatggaattatgaatttgttcaagttcctggagagataaatgaatctattacaaaattaatgaagatgttagaaaatggtgaaattgatataatgggaggtatgttatacaatgagccaatgcaaaaaatatataattatgcgggaaacagttatggagtagcaaatacagtactacaagcattatatgaaaatacagatattgataacataatgagttcgcaagatgtgaaaaaaattcgtattgctgtaatagaaaattctgatactaggcttaaagaattagatgagtattgtaaaatgaatcttatgtcacctgaattggtatattgtaaaacaagtgacgagcaattagaagtactaaagagtggtaaagcagatgtacttcttaatgttagtatgaacccaatagaaggtgtgcgtactgtagcaaaattctcatcaaagccattttatttcattactccaaaaggcagtacagacttaactcaaaagcttaattcagcaattaataatattgaacagaaggacccatatttttcaactactttatatgagaaatactttacgccagagaataatcaaatgtttttatctgatgaagaaactaattacattaaagatacagaaaaattaaaagtaggagtacttttaaacaaaccaccgtttcaaaatgcagataaagatacaggagaattaagaggtatatcaattgatttgttaaatcatatatgtgataaaacaggtttggaatttgaacttgtgcctgtaaaatctcaagaagatttggaagatatggctaaaaaacatgaaattgatattgtagcaggaatgatttatgattatgagtactctcgtgaacataatatagctatgtctcggccttttctttctactcaatatactatgatgattaataataaattaaatgagaatagtctaaatggaaagcgtatagctctagccaaaggtattgattattatggtcagtttgaagaaaatatagtttggtatgataatttagaagagtgtatagaagctgttaataaaggctatgcagattacacttatggagaaggttattctatgcagtactatatgaatcaacctaagtataaaaatgtgcgcctagttcctcaaacttatgaagcaaagagtatttgttttggcataattaaaaaagataaacaagaattattgaatatatttaataaagctattataagtatttcatcagaaaaaatgcaatcaattgtctaccaaaatactacatatagacaagatttctcgttgctttatattatgcaacagaatccaattgagactatttttattgtagcaagtttattaatttgtattattggatttatggcatttggtttacatactcgtacaagtatgaacgaaaagatatctttggaactcaaaaaacatactcagttgtatgaaatgacaagtgaatacttttttgagtatgattataagcaagataaattgataatttctatgccagaaaagggtattgagacttattatggtttggataaaagtgataaggaaagtgaaaatggcaatatagaaaatgaaagagataaaataagaagagaatataataaaaagttttttgatgtaataaaatcacaagaaaatgggactactgaaatgtattctatcatgcttgatgatacttttcattggattagaattacttcaaaaataatttataatgatagaaaaataccaatgtatgtaattggtaaaatagctaatattgattctgaaaaagaggaaaagaatagattgttggataaagttcaaagggatagtttaacaaatatttataatgcagcatatattagaaaattaactacacaaaatttattaaatttatcaactgaaaaaaatggagctttattgattatagatattgattattttaagtcaattaatgatacttatggtcacctggtaggagataaagtactgattgatgttgcaaaggtacttgatgaaagttttgcaaaagatgatatagtaggtcgtttaggtggagatgaatttagtgtttatataaatgatataataaataaggaagaacttatcaataaatgtaatgatgtatacaatcatattcatctcattaagttgccaaatggagaaagtttatctattagtatgggggtagttataacaaagcgtggtcaagagtatgatgaactgtatcaaatagcagataatgctctttatgattctaagagacaaggaagaaatagatttaaaatagtataagaattaattttaaaacagaataaagtttaataatatttaaattacaataaagcctaatgatacatgttattatctatcattaggctttatttctataagttaatattgaaagtaaatattatactaacagtagtattaatttacagagttaattttatatagattacttaaaattaaaatctatttagaatcaaaacttaaatttaatattggttcatagattttaatatttcaataacataatcccaaacattagctacagaagggatactaacatgttcatttggagtatgaacatcaaacatatctggtcctatagagatagcttcagcatgaggaagtttatcaagtaataatccacactcaagaccagcatgtagagccataacagtaggaactttaccagttaatttctcataagtttcactgcatattttttctaattttgagccttttttaaattcccaagctgggtattgagctataaggtcgtaattagcacctaaagcttgagccaaaagtcttattctatcagcgatttcatctctaatagacataacagaacttctaacagaagttaaaaattcaatagtagattctttagtttcaattatagcgaagttagtagaactttcaactaatccttctatatcaagacttactgattgaactccatgaggagttaagcaagacatttgaacaactttttctttacaatctttagtaagaactttgtctacagaagtttcagctactgagtaagtcatgccagggtcagaagtagtaaactcatgtttaaatgcagttaaaatgtcatttatttgttttttagcagattcaacatcagctttattaacagctattacacatttagcttcacgaggtatagcattgtgcttagtaccaccatcaacagaagctaattcataatcaacattcaatacacttaatactctagctattgctttgttagcatttgctctttgtaaaacaatttccataccagagtgtccacctaatagtccagtaacctcaactaataatccttgtttgtcacctttaacttccttgtattcaacaggtaaactaacaacacaagttttaccaccagcacagctaactaataagtatccttcctcctcggagtccatatttaggatatattgacctttaattaagctagggtctagtgcatctgcaccattcataccatcttcttcattaacagtaactaaaacttctagtgcaggatgctctaaagtattatcttctaatatagccatacccatagcaacagctataccattgtcagctcctagagtagttccagtagcatatatcatgtcaccatcaattcttaattttatagggtctttaagaaaatcatgttcaacattcttttctttttcgcaaaccatatccatatgtccttgaagaactacacctggacaattttcatatccttttgtagcaggctttcttattattatgtttaagctttcatcctgaatagtttcaagacctaaatttttaccaaagctaagtaaaaaatcacttatgcctttttcatttccagaacctctaggaatttgagatattttctcaaagtttttaaaaacactttctggttttaatccttctaatacgtttcccatgactcatgttcctccttaatttatctatataagtagctatttttttataagctaaaataaactcctttaaaaatattaaagaagattttttaacagattatattacaaataaagcatgtttatgtataatatatagatagctacatacatagtataatacaaaatatgtgtaaaatatatctaaaagagaaaaaatataataattttagaaatgaaaaagaaataaaacttgcattttttattggaaatgcttgaaaacatacatttttaaaattaaataaaaaagttaaaatatcgaggatggtgaatatagaaaatgaatgagaaatcgttaagagttctagaatacaataaaataatagatttgttaaagaagaaagcctcatcttctttaggtctaaaatatatagaaaatttagtaccaaatactgattttgtagaagtgaaatctatgctagaagaaactagtgaagctcaatcaattattataaagagaggttcagtagggttggaaggtattcatgatatagaagataaggtaaagagagcttatataggtgcttctcttgacccaggaagtctgattatgatagcagataccttaagagtggctagaagattaagaaatagcttatctagtagtgatgaagaagattttaattatccaataatacaatctctatcaaattctctatatgtgtacaaggacatagaagaccagatatacaatgctataattagtgaagtagaaatatctgacaatgcttcaagtacacttagagatatcagaagaagaatagcccaaaaaaatcaatccattaggtcaaaattaaattcaataataagttcaactacttatcaaaagtacttacaagatgcaataatttctctaagaggtgatagatttgtagtacctgtaaaatctgaatataggtcgcaagtagctggtatagtgcatgaccagtcatcttctggtgcgacactttttatagagccaatgactatagtagagatgaacaatgaattgaggcagttgaaactaggagagcaagaggaaatagaaagaattttatcagagatttcagctatggttggagaagtgagcgaagatttaatctctaatcaagagatacttggaagattggactttgcattttcaaagggaaaactttctatacagatgagaggaatagaaccaactttaaatgaggataaatatttaaacataaaaaatggaagacatccactgctggataaaaagaaggtagtagcaaatacaatttatttaggaagagacttccatacattggtgataacaggtccaaacacaggtggtaagactgttacaataaaaactgtaggtctatttgcacttatgacacaaagtggacttcatatacctgctgattatggaagtagtatgtgtgtatatgataatgtatttgcagatataggagatgaacagagtattgaacagagtctatcaacattttcatctcatatgacgaatatagtatctatattacaaaacgtaacagcagactctttagttatatttgacgagttaggagcaggaacagaccctgttgaaggagctgcccttgcaatagcagtattagaagatataaattctgtaggagctaaatgtatagctaccactcactatagtgagcttaaaaattatgctcttactaaaccaggtgtagaaaatgcagcagttgaatttgatatagaaactttaagcccaacatataagttacttataggtgttcccggaaaatcaaatgcgtttgagatttctagaaaacttgggctaagtgattatgtgatttcacgtgctaaagaatatataaatacagaaaacatagctttagaagatgtgttacagaatgttgaaaagaatagaatcaaagcagtagaagatagagaagaagctgaaagattaaaagaagagattgaaaaactgaaagtagagtatgacgaaaaacttgaaaaattggtcagtcaaagagataagatgattgaaaaagctaaatcagaagcattttcaattataagacaagctaaagaagaagtagatattataataaaagaacttagaaatcttgaacaagaaagagcttcaaaagaaaagaatcgtaagatagaagaacttagaaaagaattgaccagctctatgggaagtcttcagccaacagtaaaaagtatgatagttccaaaggtatcaaataaggagataaaagacttaaagccaggtgaagaagttaaggtaataactttaaatcaaaatggtagtgtagtttcagtagataaaaagagaaaagaagcagtagtgcaaattggtataatgaagatgactctaccttttaaatctttacaaaaaacacgcaaagatgtttcaacaaatgtaactaaatcaacgagaaacattataaggtcaaaatctggtagtgtaaaaaatgaagttgaccttagagggttaaacctagaagaagctataatggaagtagaaaagtatcttgatgatgcatatgtggcaggtttagagtctgtaacagtaatacatggaataggcacaggagtattaaaagcagggctacaagacattttaagaagaaatagacatgtaaaatcacaacgaggtggtcaatatggagaaggtggagcaggagtaacaattgttaaattaaaataatttgtataagaatacattagtaatttgtataagaatatattaagaatttgtataggagcacatttttatgatattggtatctgcatgtttaataggaataaattgtaaatatagtggcgataataatgaaaatgaaaaagtcaaggaatatttaaaaggcaaagaatttacacttgtatgcccagagcagttaggtggtctatctacaccaagaccacctgctgagatagttgatggaaaagtaattactaaagataataaggatgtaacagaaaactttgtaagaggggctaatgaaactctaaaaatagcaaatttatatgtatgtagcgaagcaatactaaaagagggtagcccctcttgtggatgtaatctaatatatgatggtagtttttcaggtaaaaagataccagggaaaggtataacagcaaggctgttagaagaagaaggaataaaaattaagagtgaaaaagatttatagaaaatagataaaagagtaaaaaaagtatataaagctaatattgatgtataaaaatagataaaagagtaaaaaaagtatataaagctaatattgatgtataaaaatagataaaagagcaaaataaatgtatataaaattaatattgatgtatgaaaattgataaaagattaaaaaaagtatataaagtcaactggatagtacaagaaacaataaaatagaaaaaagtcttataaaaaatcaataatagtgtgattaaaaactgcaattatagtatttttaatatatacagaaaacataattattaaagtgttttacactgtaatgaaatacttgaaaaaacacgaaatttgatttaacataaagagataagcacaatataaaccaggaacaatgtagagaggagcaacagaatgcaagattttaaggtggcaatatcaaattgccttaaagaaaaaatagaagatttatcgaaagaagagatagaggcacttatagaagttccaccaaataaggatatgggggactatgcttttccatgctttaaattagccaaagtgtttagaaaagctccaaacatgatagcaagtgaattggcggaaagtatagaaccaagtggagagataacaaaagtaatacaattaggcggatatgtaaatttctttgtaaataaatctcaattagcagaaactgtaattaaaaaagttttagatgaaaaagaaaattacggacatagtgattttggaaaagataaaactgtaatagttgaatattcttctccaaatatagcaaaacctttccatatagggcacataagaactacagttataggtaatgctttatataagatatatgattcgcaaggatacaagactataagaataaatcatttaggtgactatggaactcagtttggtaagttaatagtggcctttaaaaagtggggagaaaaagaagtagtagagtctaatccaattccagaattactaaaattatacgtaagattccatgatgaagctgaacaacacccagaaatggaagatgaagcaagagcatggtttaataaattagaaaatggtgacgaagaagcacaagaattatggcaatggtttagaaatgagagtttaaaagagtttaacagagtgtataaacttttagatatagaatttgattctttagcaggagagagtttttattctgataaaatgaacagagttatcgaactattagaagagaaaaatcttttaaaagagtctaaaggagcaagaattgttgatttagaagagtataaaatgccaccagcacttattactaagaatgatggttcaacgttatatatgacaagagatttagctgctgcaatatatagaaaagagacttatgattttgacaagtgtatatatgtagttggttctcaacaaaacttacatttccaacaatggtttaaggtaattgagcttatgggatatgattgggcaaaagatttaattcatgttggatttggtatggttgcacttgaagaaggtactatgtcgactagaaaaggaagagtagtatttttagaagatgctttaaatcaagctatagataaaactaaggaaattatactagctaaaaatccaaatgctaaaaatgtggatgaaatatctaagcaagtaggtgttggggcagtagtattccaagagttatctaacagtagaattaaagactataccttctcttgggaaagaacgcttagttttgatggtgagactggaccatatgttcagtatacacatgctagatgctgtgcagttttaagaaaagcagaagtagaagtgacttctgatatagattatagtctattagctgatgaagatagtgcagaagttcttagagttatagaatcattcaataagaatattttacttgctctaaagaaaaatgagccacatatagtgactagatttatgttagatttagctcaagcgtttaataaattttatcatgacaatccaattttagtagaaaatttggaaataagaaaagcaagacttgcattagttttagcaacaaaacaaactttagaaaattctctgaaattgttgggaatgcacgctccggaaagaatgtagcatgataaaatgttgaaataaaaagaataaaattgaacttagtacgcaatttgtataactgtaaaatatagggatgtcgaaaactgatgctttacatataaaaaagtagtatcgtataataatatatagatagtagattacaatgatttttgtacactactatccccctatatatgacagcttcttaaacgggctgtctctttttttttaataacaatttatttacattcaatttttcagaaaggatatatttatgaatgacgaattactaaaaaaagtctacacatcttcttttagtagtgcaagtagggctcttaaagatttaactataataaatacaaaatccttaatagatgataaaacgcaaagatgtgtgtatatagacgaaaatagactgagagatgaacttatttactatagattttatggagaaaaaataggaaatatcaattttttaaatattttactaccactaattttatcaaatactaatattcaaaaaagcgaagatgaggttattaaactaataaaaaagtatgttatttattttaaaaaagaagaacttttatttgattatttattaggttctgtagtgtataattccattatgcacaatcttataaataatagtaaaatagagtatgtcgaattactacagagtattaaagacaagataataggattttctatagaattagacaaatcagatgttgtaaagtttcagatggcaaggattaaagcaatacaattaattgataagtacattgatttgaaatctgaagattatgatgaagaaagtattttattaaatgttttaaatgttctatatgatgtatatatggaagatagaactgtagaaaatgaaggaattaatagcataaaaaaatctatattatccattttgggtgaagatagtaaattaaatgaagataatatagattttattttttctatgtccgaatatgttgttaaattgagaaaatataaaattggagttaaggcatataataaaagcatagacccaagaagtcttataagacttgaagaaggtaatactataatagaccctatatttaatcaaataacagttatgtcgaaaacctttaatgataatatattaagcataaaaataaattctaaatcaggtatttatatattaaagtttaaaaaggtttaggttattagagtgtgctatttttttctagataatctaaaaaatctttttccttagtgtcagttaaaaaacataattcctttactatattattcctaaggtcaatgaaatcactaatttgagtattttcattagtgtattcaagagactttataataagtagtaaatctctttttgataaagagttgatagatactttttcaattaattccataaaaaacttcctttcctcacattacttgaaattaataaattaattatatagatattatttagactttacatatactattttaacctataaggggtacaaaaagacagtataatcttaaaaagaggtgagaaatatttgaaaattttattaacaacattaaattccaagtttattcatacaaatttggctataagatatctaaaagaatttgtaagagatttgatagaagttaatatgaaagaatacacgataaacaacgatttggactatattttaaaggatatatataaaaatgaatatgatataatattattctcaacatatatctggaatgtgggagatatagttaaactttgtgataatctaaaaaaaattagacctaatactaaaatagctttgggcggaccggaagtgagttatgatagttatgaggcaatgaaaaagtatgattttgtggattatatactttatggagagggagaattaatttttagagacttagtacttcacttgcaaggaaagatgaaaataaatgatgtaaatggacttgtatatagacaaggcaatgagataatagtgaataagcctatggaattacttcaagatttggatgagattcctagtccttatgaaaacttgaatccaaaagaatatgaaaatagaatagtgtattatgaatcatcaagaggttgtccttttaactgccagtactgtttatcatctactattccaggtctaaggtattttagtttagacaggataaagagtgatttaaaagctttaatagatgcaagagtatcacagataaagtttatagataggacattcaatgcaaatagaaaagtggctatggaaatcatggatttccttatgaaaaatgataatggatatacaacttatcattttgaagttacagcgtatttgatagatgataagatgcttgagtttttggctgattgtaaagaaggtctttttcaatttgaaataggggttcagtcaacgaatgaaaaaacacttgatgcagtaggtagaagggatgattttaaaaagttgtctcatgttgtacaaactgtagcatcttatagaaatatacatcagcacttagacttaattgcaggactgccttatgaagattataagagctttgaaaattcttttaatgatgtatttaatctaggtatagagcatctgcaattaggctttttaaagatgattaaagggacaggtatgagaaaagttgcagatgagcatggttttaaatataaggattatgctccatatgagtttttatacaataattatataagctatgaagaaactttgaagctaaaggatatagaagatatactggagagatactacaattctaaaaactttgtgttatctatgagatatattataggcagattttataaacaaagtccttttaaattctttgaggtttttgccaagtattttgatgaaaatggctactttgatttggcacaaggaaagaatcagttatataaaatattgatggatttctataatgaaaaaatcaacatagataatgatgtattcaatgatatattaaaatatgactatatatcactgggtaaaacatcaaatataccacagttttttaataagctagatgtggatgattttaagaatagatgccatgtatttttacaagataatgataacttatcaacatatttacctagttttgttgataaaccagctaaacatataataaaatatgttcattttgagccatttagatttaatgttgtggatttaaaaaatgatataaatacagaaataagagaagtagaaaatgtagtcttatttgagtatgatgataaaaaaatatttgagaaatctaaaactcataaagtagagatttaagtatttaggaggataaaatggattttaagatagaaaaatatttgctaaaaaaagcagaagaattagcttttataactataaaacatggtggagagtttaaattaaaaagctataaagtgccaaaaggcggattagatgtacctataaaaaatgaggtattagtaaaagggataaaagaaaagactgctcaagataagttaaattcaatgtctatagcagatgcaatgatatatataattggaatagatagtaagtttaaaaacaatgcagagtatgagaagtttttaaatgctttatcaaaagatattgatttggatttgaaatcgtatatgggatatatgtcgagaaaatactttgagattggtgaacatacagattctttaatatatataaaagcatttataacaatgtatccagatgatttagatgcaatgtataactatgcgattgtttgccaagagatagctaaacagtatcaaaaagatatggatgataaggcaatgaatgcattcttacttgaagccatggctaagcttgaaaaggtaattgatgttgatgagaattttgcattaggttattatcacttaggctaccattattataatcaaggtcaatatttaaagactaagctgacttgggaagaagcattaaggctagggttagatgctgatttagtagctgaggtacaagagaatctaggcaagatggactttaaagttcaatatgaagaaggatatacacttgtattccaaggtaagtttaaggaaggattagagaagttacttccattagaagaagaacatatggattggtggaacttgctgtttatgatagcacttggatataagggtatgggcgaaatagagcaggctaagatgtatcttgagaagatattgataataaagcctaatcaggtggatactatagtggaattggggctttgtgaggcttataagaataatttagataaagcaatagagtattttgaacaagcggctaagataaaggaagacccagaaatactttgcaatttaggaatggcttatttaaataatggtgatattgatgatgcaacttactatatagaaagagcttatgaattaaatccacaagatgaaattactattgcttgtctaagagaacttggaataaataagtaaggatattgttaggttgtatttaattttatcggttaagtggggctatctcaaaatagagataagcctcttttttgtatgaagagttccaggagttactattggagataatgcaattatcgctgctggagcagttgtaacaaaaaatactattgtaggtggtgttcctgcaaagcttttaagagctattgatgaaatcccagaataaaatattaaactgtcttttagtcatataaattctttataacataaaaaataaattgagaaaaggtatagcaaatatggtattatttagttaaatatatataagggaggggttacttttgataaaaaaattagatgatattttagaacaacttaagggaggagagaaaattgtactctctgtagcagcagctcatgataaagaagttttaatggcaataaaggatgctgtagaaagaaatataattactcctatattggttggaaatgaaggcaaaataagagaaatatcaaaagaaataggatttgatttaagtggtatcaaaatagtggataaggatgatatcaaagagtgtgcagaaatagcagttaaattagtatcaagtaaagaagccgactttgtaatgaaaggattattagatacatctgtcatattaaaagaagtgttaaataaagactatggtcttagaactgatagtttattaagtcatgttatggtatatgagttagaaaaataccataaattacttataactacagatggaggtatgaatatagctcctgattatgaacaaaaggcaaagatattaaaaaattctataaaagctgcaaaagctttaggaatggaaactgtaaaagttgcatgtttggcagctaaagagaaagtaaatcctaagatgcaagcaactgtagatgcagatatgttagcaaaagcttgtaaagaaggagaatttggtgaaaatgtaattgtagaaggtcctctggcttttgatttagctgtttcaaaagaagctagtgagataaaagggtttaaaagtgaagtatctggagatgtagatatcatattggttccaacaatagaggttggcaatggaatagggaaagcctttacatatatggcagactctaaatcagcaggtataattatgggtgcaaaagctcctatagttttagtgtcaagagctgattcacatgaatctaaattatattctattgcatatggggctattgtagctaaaaatatgaaataggataaatcgcttgaaataaatgaattaaagtagaaaaaatagtcaaaatgtctaaattaatgctgtattaaaaaagttttatataaaaaataattatagcttcaaatgaatatatacaaatgttcaatttgaagctataattaatattaaagtaggaaaaataaaaaaattcaaaaaaattagtccaaaaaatgctattctaagaagtttttactaattaagtttagggagtaaaaatctgtaataagtccaaacagtagtgaaagataataaatacacaaacaatctgcaataatataaaaatgactagaaaaatttcaaatttgatttaaaaaaatcaaaacataatttaattaaactgaagtatcaaaaaagtaggtttagatattaacaaatagccaaaaacaagcgataaaatcaacttaaattaagtgtagaaaataaaatttttatgtattatctaattttgttaaaaaaatatttaaatctaaagcaaagcactgaaaattagtatataatcaacttagaaagcatttattttattattttatgacatgaagtcagtcacctgggggattttaaaaatcaaaaaaaggggataggaatatggatgaaaaaatgttaacaattgatttaaacagccagaagatgatagctaaagctagagaagaaggcgtagaaacaatgtatgatagaaaagaaggctttaaggcacaatgtggttttggtcttcaaggtgtttgctgtagaatatgtggaatgggaccatgtagaataagccctaagactccaagggggttatgtggagcagatgagcatactatagtaggtagaaactttgcaagaatggttgctggtgggacagctgcccattcagaccatgctagagatatagcacatacattagcattagctgatccaaatggaaactataaaataagagacgaagctaagttaattactttagctaaagaatgggatgtagagacagaaggtagagatatctatgatgtagcacatgaagtggcagaaattgcattaatggaatttggaaaaccttttgggacattaagatttataaaaaatgcaccagaaccaagacaaaaaatatggaaagaatacgctatagagccaagagctatagatagagaaattgcaacaataatgcactctactcatataggatgtactggtgatatagatagtttaatacacatgagtcttagaacttctatggctgatggttggggtggttctatgataggtactcgtctaagcgatatcttatttggaactccagtgccaagaagaacagaggctaatttagcagtattagaagaaaataaagttaacataatattacatggacatgagccagcattatcagaaatgatagttttagcatcagaagagccagacttagtagctttagctaaagaagttggtgctgatggaataaacttagcaggtatgtgttgtacaggtaatgagattacaatgagacatggtgtaaaaatagcaggagacttccatcaacaagaacttgcaataataactggagcagttgaagctgtaatagttgacgttcaatgtatattccctgcattagctagagttgcagattgttaccatactaaatttgtaacaacttctccaaaagctaagataacaggttcaacttatattgaatttagagaagaacaagcacttgatgatgctaaagcaatagttaaagaagctattttaaactttaaaaatagagataaatcaaaagtacttatacctgaattaaaatcaggcgcaacagttgggtatagtgtagaagcagtagtaaatcaattagacagagttgtaaactctcatatagacccagcaggaacagttaagccattaacagactgtctaaaagctggagtattaagaggagcagctggtgtagttggatgtaacaatgctaaaggagtttcaaatgaggctcacgtaacaataatgaaagaattaatcaaaaacgacataatagtagttactacaggttgtggagcttcagcagcagctaagtttggtttaatggaatctgatgcggctgaaaaatatgcaggtaaaggtcttgcaactgtctgtaaattagtaggaatcccaccagtactacatatgggttcttgtgttgatataagtcgtatactagatttagttggagcagcagctaattacttagatatggatatgtgtgaccttccagttgtaggtatagctccagaatggatgtcagaaaaagcagttgctataggatgctatgttgtagcttctggtatagacacttatttaggaataatgcctccaatagctggttcttcaagagcagtggatatattaactagtgagttaaaagataaagttggagctacatttactgtaaatacaaatccaaaagagttagcagctacaataatagaagatatagagaaaaaacgtgttcactttgaagcattagttgaagaaaaaatggcagaaaaggctgaagcttaaaaaatagtgaagttatagaataaacgtttttataagaagtttctggttgagtaaagttgaataaagtcaaatattaaagtaaagaacatcgaaatataatgaatatactgaataaataaaatataaacaatattaaagaataataaaactatacatgctgctttgaaaagctagtagggtaaatttaattggttcctgtaaggactagctgtagtttatttttagtgtataaaaatatagagtataaaaaatatttaactgtaaaattaactactaaaaagcaaatagtaataaaaggtggtagggattatgaagatagcaataacaggtaaaggtggagtaggtaaaacgactttttcttcaatgctctctaggatgtttgctgaagacggatacagagttgttgctgttgatgccgaccctgatgctaatttagctttagcactaggttttccaaaagaagtatatgaatcaatagtacctatatcagaaatgaaaaaattagtttcagatagaacagctgcttctgtaggttcatttggaaaaatgtttaagatgaatcctaaagtagacgatatccctgaaaatttctgtaaagaatacaatggagtaagattacttacattgggaaccgtagattctggtggtactggatgtgtatgtccagagcatgttcttttgaagagactctgctcacatttaatactacaaaataaagatgtagtggttatggatatggaagcgggaattgaacacttaggaagaggaacagcccaaggtgtagatgcttttatagtagttgtagaaccaggagagagaagtctacagacttatagaaaagttaagaaacttggacatgatataggtgtaaataaagtatttgtagtaggaaataaaattagaaataaggaagatgaagaatttataatccaaaacttagaagatggagaatctttaggatttatttactataaccaagatgttattgattctgatagagctaatcaatctccatatgattctagtgaaacaacgaaagaacagattaaagcaataaaagataaattaatgtcacttaaggataaataaaatagatagaaattttgatttgggattttaagttggttaaaggttagacataggcaatagataggtaataagtaagtaattagataaataactagctattaagtttgaatattttaatagcttagtagctagtttttaagtaattttacatgtataattatcttataaaatataatttttacatattaatacaatttttacaaaaattatattttaaatctatttaggttgtgggaggagattcagttatgggatttaaatctgacattgaaatagctcaagaagctaagcctcaagatattagagaggttgcaaaaaaattaggactaggtgaagatgatgtagaactttatggtaaatacaaagcaaaagttgactacaatctactaaaaagagagactggtaaaaaagctaagttaatactaactacagctataaatccaactccagcaggtgaaggaaaaactactactactataggtgttgctgatgcatttgctaaactagacaaaaatgtattagttgctttaagagaaccatctctaggaccagtatttggtgttaaaggtggagcagctggtggaggatatgcacaagttgttcctatggaagatataaacttacacttcacaggagattttcacgctataggagctgctaacaatcttttagctgctatgcttgataaccatattcaccaaggaaatgcacttagaatagaccctaagaaaataacttggagaagatgtgtggacatgaacgatagacaacttagaaatatcgttgatggtatgggtaaaaaaggtgatggagcagttagacaagatggattcgatataactgttgcttctgaaataatggcagcgttctgtttggcaagtgatatatctgatttaaaagaaagattaggaaacataatagttggatacagctatgaaggtgaacctgtaacagctagacaattaaaagctaatggtgctatggctgcattattaaaagatgctttaaaaccaaacctagttcaaactcttgaaggaacaccatcatttgtacacggtggaccattcgcaaatatagctcatggatgtaactctgttatagctacaagaatggctatgcactttgcagactatgtaataactgaggctggtttcggtgctgaccttggagcagaaaaattcttagatataaaatgtagaatggcaaacttaaaaccagatgctgttataatagttgctactgtaagagcattaaaatacaatggtggagttgctaaagcagacttaaataacgaaaacctagaagctcttgaaaaaggacttccaaacttattaaaacatgttgaaaacataactcaagtatatggattaccagcagttgttgcaatcaatagattcccacttgatactgaagctgaacttaaacttgttgaagacaagtgtaaggaattaggtgttaatgttgctctttctgaagtatgggcaaaaggtggagaaggtggaattgcagtagctaaagaagttttaagattattggatgaagaagaaaataactttagattctgctatgaagatgatttatctataaaagacaagataaatgctatagctactaagatttatggagcagatggtgtagattatactcctgaagctgataaggaaatagctaacttagaaaaacttggatttactaaagttccagtatgtatggctaagactcaatattctttaactgatgaccaaactaaattaggtagaccaacaggatttagaataactgtaagacaagcaacaatttcagcaggagctggatttatagttgcacttactggagaaataatgaagatgccaggattaccaaaagttccagcagcagaaaaaatagatgttgatgaaaatggagtaatagctggattattctaaggaaattaatttataaataaagagtaggagatatcttaaaatagttcgtaaaatatctcgaataatttgagatattttcctacatcctttcaaggaggattatcatgaaaatagcagataaaacttgtgttgattttgtagaagtactatcttccaaagaagcagtaccaggtggtgggggagctgctgcactagtaggtgcaataggtatggctttaggtagtatggtatgtaaccttacaatagggaagaagaagtatgctgagtatgaagaaagcgtaaaagagatattaagtaaggcaggaaagttagaaaaagatttattaaaaatgatagatgatgatgcagaatgtttcttaccattatcaaaagcttacgggcttcctaaagaaacagaagaagaaaaaagaataaaagcagaaacaatggaaaaggcattaaaagttgcttgtgaagtaccattaaacatagtaagagtttgctatgaagctattaagttacatgaagatttagttgataaaggttcaagacttgctataagtgatgttggtgtaggagttcagtgtttaagagctgctatacttggtggacaattaaatgtagttataaatataaattctatacaagataaagaatatgttaataaggtaaaaatagaagtagataagttagttgaagatggtgtaaaaatttgtgatgaagtttatgccaaagttgaaaaagctcttggaaaataatttttaaatgacgaaagtagatactatgttattaatatgtggtatatagaataaattaatttaagtttgcttgtaggggagttgtgaatgtatggaaggaatgtcaactaaaggacaaattataaaaggaaaacctgtagctgataaaattagtgaagaattaataaaagaagtcgatttactagttaaagaaggtataaatcctaaactaacaatagttagagttggggcaagaagtgatgatttatcttatgaaagaggagcactaaagagatgtcaaaacataggtataacaacagaagtgttagagttagctgaggatataacacaagaggaatatattgatgtattaaagagagttaatgatgacaaaaatgttaatggtatattatgttttagacctcttccaaaacacttaaatgaagaagttataaaatatgttattgcaccggaaaaagacgtagattgttttagtccaataaactctgctaaggtaatggaaggggataaaagtggatttccaccatgtacacctacagcagtagttgagatattaaaacactataatgttgatttaaaaggaagtaaggtaacagttcttggaagatcaatggtagttggaaagccagtatcaatgcttttattaagtgaacatgcaactgttacaatatgtcattcaaaaactaaaaatctatcaggtgtagcagcagaggcagacgtgctaatagcagctattggtagagctaagatggttgatgaaagttttgttaaagatggagcggtagttatagacgttggtataaatgttgatgaagaaggaaatttatgtggagatgttgatacaaatgcagttttagacaaagtatcaatgataactccagttccagcgggggttggttcagttacaacatctatacttgcaaaacatgtagttaaggcttgtaaattacaaaacaataaatagagatatatatgtggaaggtttaggggggaagtagatatgataatttctgaaaataaaccattagaagaagtgctagggtacttaaaggattttgacaagctggttttagttggttgtaatcaatgtgcagcaacttgtaaaagtggtggggaagaagaagttttaaaaatgaaggaaactcttgaaggtgaaggcaaaaaaatcttaggatatgtaatgcttgaccctgcttgtaaccttttaaagtctaaaaaggatttaaaggctctaaaagaagagactaaggaagctgatgcagttttatctttagcatgtggagatggtacacagacaatagttaagaatttaaaagataagccagtttatccagccaacaatactttgtttataggggaagtacaaagagttggagaatatgaagaagcctgtaaggcttgtggagactgtgaacttggttggacaggtgggatatgtccagtaactatgtgtgctaaaggtcttatgaatggggcttgtggtggagctaaaaatggtaagtgtgaagtaaactcagagaatgattgtgcttggataaagatatatgaaagactagaagctataggacaattagataacttagcagaaataagaccaccaaaagactattctaagcaaaataatccaagaagtttaagtgcaaagaaaaagaaagaagcagcagcaaattcataaaagttttttttagaaggttaaaagggggattagagatgagcttattaagagaaacattagaaagtggaaaatttgcagttactactgaaatggctcctccaaaagggactgacctttcacatttaatagaatgtgcaaagccgttagttggaagagttcatgcagcaaatgtaacagactttcaatcggcagttatgagagcaacttctcttgctacatgtaaattattaaaagatgctggattagagccagttattcaaataacagggagagatagaaatagaatagctatacaaggagaaatgttgtcagcaggtgtatttgggataaacaatttgttggcactaacaggagaccatactagcgtaggagaccatccacaggctaagggagtgtttgatttagattctgtggggatacttcaaactgctgagactttaatggcaggtacggacatggctggtaataagttaaaaggttctccagatttttatctgggagcatcagtaactccagaatattctccaatagaagttcaattattaaaaatgcaaaagaagataaaagcaggggctaaatttttccaaacacaagcactttatgacataaatacaatgagaaagtttagagaattaacaagggatatggattgcaaggtattagcaggaatagtacctttaaaatcaccaggaatggctaaatttatgactgcaaatgtaccaggaatattcgttccagatgaacaaatcgaaagattaagagcagctggaaaagaaaactgggtaagtgaaggaataaaaatggcaggggaacttatcaaacaattaaaagaagaagatttatgtgatggtgttcatataatggcaattggggcagaagagaatatacctgctatactggatgccgcaggtttatagtattgcaagattgtagattatattaggtttgggggaattaaggatgaagatagtagtagtaggtggtggaccaggaggatatgtagcagctataaaagcttctatgcttggtgcagatgtaacggttattgaaaaaagaagagttggaggaacttgcttaaatgcaggatgtataccaactaaagcacttcttgcttcttcaggagtattgaatactgtaaaagaagcaaaggattttggtatagaaatagatggtacagttaagccaaacttcactgccataatggaaagaaaaaataaagttgtaaaccaattaataagtggtatagagttcttatttgaaaaaagaggagtaaacttagttaatggttttggaaaattaattgataaaaacactatagaagtaactaaagatgatggaacagtagaaactataaaagcagataagataatactagcaaatggttctgttccagttgtaccaagaatgttcccatatgatggaaaagttgtaataactagtgatgaagttcttggacttgaagagatacctgagtctatgttaatagtaggtggtggagttataggatgtgagatagggcagttctttagagccttaggaacagaagtaactatagttgagatggttgaccaaatactattaaatgaagacaaagatgtagctaaacaactacttagacaatttaagaaagataaaattaaggttattacaggtattggagtacaaacttgtgaagtagttgatggtaaggcggttgcaactctttctaatggaaaggttatagaagcacaatatgcattagtatgtgttggtagaagacctaaccttgacaattctggagtagaagatataggaattgaaatggaaagaggaaaagtagtagttaatgaacatcttgaaactaatgtagaaggtatatacgcaataggcgatataatagatactcctttcctagcacatgttgcttctaaagaaggtatcgtagcagttgaaaatgctttaggtaagactaaggtagtagattatagagcaattccaagatgtgtttatactgaacctgaagttgctggtgttggtaagactgaaaagcaacttgaagctgaaggtgtagaatacaatgtaggtcaatttgattttagaggtcttggaaaagcacaagctataggacatttccaaggatttgtaaaagttatagctgacaaagaaactgataagataataggtgcagcagtagtaggacctcatgctacagatttattgacagagttgtcacttgctgttcatctaggattaacagtagaacaagtaggggatgcaatacatccacatccaagtttatctgaagggctaatggaagcacttcatgatgtacatggagaatgtgttcattctgtacctaaattataatagacagacagagtacataaggctctgtggctagatttaagggggaagtcttaaaatgggatacaatatagctgttgcaggaaaaggtggaactggtaaaacaagtctcacagggcttttaattgattatttggttaaggacaaaaagggaccagtattagttgtagatgctgatgccaatgctaacataaatgaagtgttaggtatcgaagttgaagcaacaataggagaaataagagaagaagtaaatcaaagagaaaagttaggcaatgcattccctggtggtatgacaaaggcacaatatcttcaatttagattaaattctataatcgaagaaggcgaaggatatgacttattagtaatgggtaggtcagaaggtgaaggatgttactgttttgtaaatgggatacttagagaacaagtaaacaaaatatctggtcattacaaatacttagtcatggacaacgaagctggtatggaacatctaagtagaaaagtcactagacatgttgatacacttttattggttagtgattgctcaagacgtagcatacaagctgttgctagaataagagatttagctgaggaactaaagttaagtgttggaagaatacttttgattgtaaataaagttccaaatggggttatgaatgatggtgttaaagaagaaattgaaaagcataacctagagctaatcggtgttgtacctatggatgaattgatatatgaatatgattctacaggtattcctttagttaatttacctgaagattcaaaatctaaagtggctatgaaagaaatttttgctaaattagaattaaaataggcttaagggggaaaaaaatatggcatttaaaatgtctactcaaaaatattctggaaaaatatcagaagttgaagtaggaataggggaaaaagcaattaaattaggtggggaaaatgtattacctttttatagttttgatggagaagtaggtaattctccaaaaataggtatacaaatatcagacgtttatcctgaaagctggactgattcatataaggaattatacaaagatgtagctaattgtccagtagagtgggctaaatatgttgaagctaatacacaagcagattttatttgtttaaaatttgatggttctgacccaaatggattagataagtcagttgatgaatgtgctgatgtagctaaggcagtaattgaagcaataaaattacctttagttgtagctggttcaggaaatcatgaaaaagatggtaaattatttgaaaaattagctcaaacattggatggacataactgcttatttatgtcagcagtagaagataactacaaaggagtaggagcatcagctggtatggcttatgcacataaagtaggagctgaatcttctgttgatataaacctagctaaacaattaaacgtattgttaactcaactaggcgttaaaggtgaaaatatagttatgaatgttggatgttcagcagttggttatggatatgagtacgttgcatctactatggatagaattagacttgcagcatttggtcaaaatgataagacattacaaatgcctatcataacaccagtagcttttgaagtaggtcatgttaaagaagctatagctccaatagaagatgagccagattggggttgtccagaagaaagaactatagcaatggaagtttcaactgcagcaagtgttttagtaggtggttcaaacgcagttatacttcgtcatccaaaatcaatagaaactataaaagaattggttaacgcattagcttaattaaattgttaaggttagggggaaaaaataatggcattaaaagctttagatatatttaaattaacaccaaagaaaaactgtaaggattgtggattcccaacttgtatggctttctctatgaaggttgcttcaggagctgtagaagtaggtaaatgcccacatatgtctgatgacgctatagcaaaattatcagaggctactgcacctttaatgaaagctttaaaagttggtgctggtgcatctgagtatgaactaggtggagaaacagtattatttagacatgaaaaaacattagtaagtagaaatagatatgcagtttcattctgtacttgtatgagtgatgaagcagtagatgctaaaatagctaacatgaaaaaagttgactatgtaagaattggtgaacaaatgaaagttgaaatggctgttttagagtattgtggagataaagatgcgtatttaaaattaatagataaaataaaaggcagtggattagaagtagcttatattttagcttgtgatgatgcacaagtagttaaagaagctgttgaagtattaaaagatgctagaccaatggtatatggagcaactaaagagaactacaaagatatgatagaagtagttaaaggagcaagtttaccattaggtgtaaaagctggtagcttagaagaattatatgaaacagttgaattaattcaagccgctggatataaagaattagtattagatgtaacaggagaaaacataaaagatacttacactaatgctatacaagttagaagaacagctttaaaagagcaagatagaacatttggatatccttcaatagtatttgcaaatagattatctaattcaaaccctatgatggaagttgctttatcatcaatattcactataaaatacggttctataatagtaatagatgatattagttatgctaaggcattaccattatttgcactaagacaaaacatatacactgacccacaaagaccaatgagagttgaaccaaagatttatccaatcaacaacccagatgaaaattctccagtattagttactgttgactttgcattaacttacttcatagttgctggtgatatagaaagatcaaaagttccagtatggttagtaataccagatgcaggtggatattcagttcttacatcttgggctgctggtaaatttggtggaaactcaatctctgctttcattaaagaaagtaaggtagaagaagtaactaattgtaaagaccttatcattccaggaaaagttgcagtacttaaaggtgatatagaagataacttaccaggatggaatgtagttataggaccagaggaatctatggaattacctaagttcttaaaaggataccaagaaaaagcatgccaaacaaactaataaaatattaactaactattaatattaaatttaaagggggacattataaatggaaaaatttatgattataggtgagagaatacattgtatatcaccttcaataagaaaagcattagcagaaagagacccagctccaatcttaaaaagagcaaaagagcaattagaagcaggagcacactatatagattttaatataggacctgccgaaagagatggcgaagaaataatgacatggggaatcaaattacttcaatctgagttcaacaatgttcctatagcattagatacagctaataaaaaagctatcgaagctggacttaaagtttatgatagaactaatgcaaaaccaataataaactctgctgatgctggctcaagatttgatttaatagatatagcagctgaatacgaagcaatggttataggtttatgtgcaaaagaaggtatcccaagagataatgatgagcgtatggcttactgccaagaaatattagaaaaaggcttaatgttaggaatggagccaactgatatactatttgacccattatgcttagttataaaaggtatgcaagaaaaacaagtagaagttttagaagctataaaaatgatgactgagatgggacttttaactacaggaggattatctaacgtatctaatggatgtcctaagcatgttagacctgttttagatagtgcattcttagcaatggcaatggctaatggatttagttcagctataatgaatccatgtgacccagaattaatgaaaactgtaaaatcttgtgacataatcaacggggcatctttatatgcagactctttcttagagttaaatgaaggtggatttgctttctagggtttttagggtatagttaataaaaaataggtgtaaatattaaagggggaaatagaatgaatctatataatataatctttacagggtcagaacaagctttaggtgcggctcaagctatgttagctgaagctatagaaaagaatggaaaagagcataaagttgctttccctgatacagcatattcattaccttgtatatatgctgcaacaggacaaaagatgaacactttaggggacttagaaggtgctttagaagtagtaaaatctttaataaatagaactcatttactagaacatgcttttaatgctggtttagctacggctttagctgcagaagtaattgaagcattaaaatattcaactatggatgctccatatagtgagccatgtgcaggtcatataactgaccctataatcagatcacttggtgtaccattagttacaggagatatacctggtgttgcagttgttcttggtgagtgtccagatgcagaatcagcagcaaaagttataaaagattaccaatctaaaggtttactaactttcttagttggtaaagttatagaccaagctatagaagctggagtaaaaatgggtcttgagctaagagttatacctctaggatatgatgtaacttctgttatacacgttgtatctgttgcagtaagagcagcattaatattcggtggattaactcctggtgatttaaacggattattagagtacacagctaatagagttcctgcatttgttaatgcatttggaccattaagtgaattagttgtatctgcaggtgctggagcaatagctttaggattcccagttataactgaccaaacagttcttgaagttccaatgaacctattaactcaaaaagattacgataagatagtagctacttcattagaagctagaggaataaaaataaaagttactgaaatacctatcccagtttcatttgcagcagcatttgaaggtgagagaattagaaagagcgatatgtttgctgagtttggtggaaacagaactgaagcttgggagcttgttgttaagaaagaagcaacagaagttgaagaccataagatagaaataataggaccaaatatagatgaagttgatgcagatggtgtattaagattaccgcttgctgtaatagttaaaatagctggtaaaaatatgcaagaagatttcgagccagttcttgaaagacgtttccactacttcttgaactatatagaaggtgtaatgcacgttggacaaagagatatggcttgggtaagaatctctaaagatgcatttgataaaggatttagacttgagcatataggagaagttttatatgctaagatgttagatgaatttgaatcagtagttgataagtgtgaaataactataattacagatgctgaaaaagtgtctgaattaaaaggagaagcaatagctaagtacaatgctagagatgaaagattagcttcattagttgatgaaagtgttgatactttctattcttgtaacttatgtcaatcatttgcaccagctcacgtttgtgttgttactcctgaaagacttggtctttgtggagcagttagctggttagatgctaaggctactaaagaattagacccaacaggtccttgtcaaccaatagaaaaaggcgagtgcttagatgatagaacaggtgtatggaattcagtaaatgaaactgtaaaccaaatatctcaaggtgcagttgaatctgttacattatattctatactagaagacccaatgacttcttgtggatgcttcgaatgtatctgtggtataatgccagaagcaaacggatttgttgtagttaacagagaatttgcaagtgttactccagttggtatgactttcggagaacttgcttctatgacaggtggaggagttcaaactccaggatttatgggacacggaagacatttcatatcttctaaaaaattcgcttatgcagaaggtggaccagaaagaatagtttggatgccaaaagaattaaaagattatgtagctgataaattaaatgctacagttaaagaaatgactggaatagaaaacttctgtgatatggtttgtgatgaaactatagctgacgattctgaaggagtattagctttcttagaagaaaaaggtcatccagcattagctatggaaagtgtaatgtaattgatggaaaatttaaaataatatgatataatattaatatgatttaagtaatttaatcaataatataatattgggggtctatcgaaatgaaattattaccagaattaaaatactctaaagatcatgagtgggtaaaagtaattgatggagatgttgtatatataggtataacagactatgctcaagatcaattaggagaaatattgtttgttgaaacaccagaagtagaagatactgtaactaagggagtagattttggagtagttgagtcttctaaagtagcttctgatttaatatctcctgttaatggtgaggtattggaagttaatgaaaaattagaagatgagccagaatgtataaatgaagacccatatgaaaactggatattaaaagtaaaactagctgatgtggctgaacttgatacgttattaagtgataaagaatacgaggctggattagaataattaaagattaagatattattataattggggaaagtatagtaaaatttgagtgcacgcaaatttagctatactttccttttatcatatatagaacaaattgggagggataacatgataaaagtgagttttacaccaaacaataaagaggtttattgtaatgagggtgatatattactagaggttgcaagaaatgcagatatattcatagatgctccttgtaatggaaacgtgtcttgtgggaagtgtaaagtaaaattattgaatggaaaagttgatacagaaaaaacaagacatataacagatgatgagtgggagcaaggttatatactagcttgttgtacaaaggtaatatcagatatagaaattgaagttccttctaaagtatcatcttctatgcatggtatgaagatagaaggtagtaataaaaaagaggatagggaaatttttgaaagagctaaaaaaataattgaagaacataaccttcaatttaaaacaaatataaaaaagaaatacatagaaatggaagaaccaaatttagatgataatataagtgatgtagatagattggaaagatatgttagaaatagcctaggatataatgaaatagattttagattggatatacttagaaaaatgccaactgtatttagaaagagtgattttaaggttacaataacatatgttcaaaaacaaaagaaacttacaatcataaatatagaacaaggtaataaagaaaattccttatacggagttgcaatagatattggtacaacttcagtagttgtttgtttagtagacctatattcaaaagaggtagtagataaagcatcttctggaaatgcacagataaaatatggagcagatgttataaatagaattatatattcaactaagaaaaatggattagagacacttcataaagctatagttgaggaaactataaatccactattaaaaacaatatatgaaagaaatggaatagataaggaagatgtagttacattagtggctgccgggaatacaactatgacaagtttattcttgggtgtgtatacagacttcttaagacaagaaccttacataccaccatttttaaaatctccaaaacttatgggtgaaaatgttggtctttttgtaaatgacagtgcatatgtgtacttagctccatctgttgcaagttatgtaggaggagatataacagcaggtgtattatcagcagggatatggtcaagtgaagaaaatgttttatttatagatttaggaactaatggagagattgtatttggaaataaagattatatgatgagctgtgcatgttcagcaggacctgcttttgaaggtggagggataagctgtggaatgagggcatcagcaggagcaatagagaaagtaattattgataaagaaactttagagccaacattaaagattattgatgaatgtgcaccagttggtatatgtggttctggtataattgatttaatctgtcaaatgattactaaaggtgtaatagatagaagaggtaaaatatacagggatttagataataagagagttagatttaatgagcatgagataggagagtatgtattagcatttaaagaagaatttgatttagaaaatgatatagtagtcaatgaagttgatatagataatttcatcagagctaaaggagctatatattcaggtgcatacactcttgtagatagtttaggtatggattttagtatattagatagggtttatatagcaggtggtataggaaacaacctagacatagaaaactcaataattatagggttacttcctgacattgatagagaaaaatttacttatatagggaatagttcacttgttggttcttacttagctctcataagtaaagatgcaaaaaataaacttgaagaaataggtaatcaaataacttatgttgaacttagtgtatatccaagttatatggatgaatttatttctgcatgtttcttaccacatacgaatatagagcagttcccaacagcaaagaaattactagaagagtaaaatgtacttaagaaggaataaactatgaataagaatctatctgaaaaaatgaaaatagcatttgatattaaattaaagaattttggaaataaaatagagtttgcttatcctaaccagacactagctcttagtactacaagcaatcaatgtagtttgaaatgtgcccattgcaacggtcactacttaaacaatatggtgccaatagaagaatatgaggaaaaagtacaatcaaggaatataactagctttctattgagtggcggttgtagttatgagggagatgtccctataaatactcatattaataccattaaaaacttaaaagagaaaggatatagattgaatgctcatttaggtcttatggataaagatagcattgtagagttgtgtaagtatttagatatagtttcttttgatttagtgtttgatgatgagacaataagagaagtttataagatgaaaaagagtaaagaagattatattgaagtttataatacaatacaagaacatacagaagtagcaccacatatatgtattggtttaaaaggaggacaaataaagggtgaatatgaaattatagaatacctacagaaaaatcctcctaataagcttacatttatagtccttattccaacaaaagggactgagtatgaaaatgtagaacctcctgagttagaaggggtagcagatattttatgtgaagctagaattaatttaccagatactgaaattaatctaggttgtatgagaccaagaggagtgtatagaaaagagctagaccaattatctataatgtgtggagtcaatagaatagtattaccatcaaggtctgcaaagaataaggctatagaaatgaatatgacaataaatgagtgtaaggagtgttgcgttttatgattagactatcagttgggacagcaatagagcttgggatattaaacaaaaaaagcgatatacctcctaccacagcatatataatgattggagaaaaatgtataaataaatgcagtttttgttctcaatcaatagaaagtagtactagaaaagataaattatcaagagtaatttggccagagttttcaaaagaagaaatattagatgctttaaaagcttataaaggaaaaaatataaagagaatatgtattcaatcaatggcaagtgaagaagcacataactctgttttagactttataaactatataagtggtaagatagacatgccaatttcactatctgcaaaattagaaaatgatgaacagataaagaagtttttttcagtaggagttgataaaataggaatagcaatagatgcatcaaataaagaactatatgaaaaaataaaaggaaataactatgatgaaaagttaaaatttataactgaaatgtcaaaatcatatcccaataaaataagtacacatataatagttggtatgggtgaaagtcatgaagatatatacaatttatatatttatttaaaggaaaatgatgtaacgattagtttatttgcatttactccagttagaggaactaaaatggaaaagataaatcaaccaagcatagaaagttatagaagggtacagttaatgtcttatatgataaataaaggttatccaaaagagtattttaagtttaaaaatggatacttaaatagtataaagcttgacaatgatattttaaaagacataaacaaaggctatccttttgaaataagaggttgtaaggattgtaatagaccatactataatgaaagacccggaagtactatatacaactattcaagacctttaaatcaaagtgagatagatttagcaataagagaaataaatctatagaggatttctaggatatatttatactaaaaatgggggcgtaataatcatgaatcagtggagagttatacataataaatcatatgaaggagcaatgaatatggcaattgacgaagctatatttactgcatataagaaaggacataataagccaactcttagattttatacatgggaaccagcttgtttgagtataggatattttcagaaattggaagatgagatagatttagataagtgtagatgtatgaatatagactatactagaagaattacaggtggaagagctgtattacatgataatgagctaacttatagtataattataggagaagataatcctttaatcgataagagcatcaacctatcttatagatatataagtgaaggtctagttaaaggattgaatctaagtggtatagaaacagataatttaaatagaggcgagagaataagtagggaaaatttatcagctgcatgttttaatgcacatgcatcatatgaagttactattaataataagaaggtaattggaagtgctcaaagcagaaaagatggtgttttattacaacatggttcaataatactggattttgatgtagaaaaattgtttaaattaataaaaactaagacaccagaattgaaagaaagagctatgaaatttacagctaaaaaagcaagtggaatagaaaatgaaattggcagaaaaatagacatagatattctacagaaaaacatagtaaagggattagctgaacaatttaatgttgagtttgtggagggcgatttgactgattatgagaagcaattagttaaagaactatatgaaaaatacaagaatgaagagtataataaaaagcgttaactttaattgactttacataaattaaagtgatatacttaaggtataataatatacaaaaactgaaatcatgaaggtttctttggagtattgaaatacctaagggaatctttttttgatttttaataaaaatcatattaggaggagatttatatgtgtgaatcatcagctttcatttgtaaaagtaataatgagttagaaaaggttatggaaaatgtggttaatatagacccttgtgatggaaagatttatttaacggatttattaggagagcaaaagataatagatgggataattaaagaaataagattgatggaccataagataataatacaagaaaattaattaataggggaatttcatatgataatagcagtgatagatggaatgggtggaggtattggagcccagatagtttcttctttgagagaagagttacctacatatgtagaaatttatgcactagggactaattctatagcaactagttctatgatgaaagctcatgctaataaaggagctacaggggaaaatgctatagtagtatcagctaaaaaagcaaatataatagttgcacctatttctgtaataatacctaattctatgatgggagaagttacttgtaatataagtgaagctattgcagacagtgaggcacttaagatacttttacctattatgccagaaaatgtggagttagttggattagaaggtaaaccattagcactacttgtaaaagattctgtaaaccttataaaaaaagagtttaatataaaataacagggggaataactaatgatttttgataaagagattgtaagatatcatcatggacatcatgaccatgaccactgccacgaacatactcatggagatatatgtcatgaacatccacatgaccatgctcacgaccacgaccatgaacatagtcatgaggaatcatcagagtctaaggatgaaaaaactttaaaaatacttttagtacattggataaatcacaatgaaactcatgaagaaggatttagagagtgggttgaaaaggctagagctattggaaaagaagaaacagcaaagagtattgaaaaggctatagagtatatggaagaagctaataaaatgttgttagaggctaaaaaacatatgtaaatataattaatcgcttatacgtttgatataagcgatttttatattttatgatgtttaattattaaaaattttatctaaggggttatctcaagatggatgtaagcctccctttcattgttgaaatgataaaaatatatctaatttcatgcaaaaaagagtatatcatgaactaaaaagtttattttgagatattttctgtaatatactttaatgagtaaattttattacaagattggattatttaatgttaaataattatatattctttaaatactgcaaaagcttcatcaaacaatttgagttatttgattaattatatattgagtattactatttaaagatagtattaatgttaagttaaaaaataatattaatgttaagttgaaaatagtactaaagataagatacttaaaaggcagtttaaaattactctaatattagatataataaaaattagcatgattaaaaatattattttgaagttaaaaaatttatgcatttatattagattttttctttaaaaaaggagtgaattatttatgaaagatggtcatatacattcaccttattgtcctcatggaagtaaggatgattttgaaaaatatgtacaaagagcaatggatgttggaataacagaaatgacatttacagaacattttccgtatgcaaatggatttagagaccctgctcctgaaaatgatagttgtatgagtattgaagatttaccaaagtattttaatgatgtcaagaagttgaaagaaaagtatgagggtaaaatcaagataaatgttgggtcggaagtggattttatagaaggatacgaagaagggataaaggagaatttaaataaatatggaaaggaattagaagactctcttttatcagtacatataattaaaattgatgatgattattattgtgtagattacagtgtagaggagtttcaaaatttaatcgacaaattaggaagtattgaagctgtttataataagtattatgaaacattgataaaagctgtaaattcagatttaggtatacataaaccaaaaagaataggtcatttaaatttagttagaaagtttaatcaggtatttccatacgattataaaggaaatacaattcttgaagacttaataaagttaattaaagaaaaaggttatgaacttgattataatgtttctggaaatagaaaagagtattgcaaagagccttatatagatggatacttattagagttggtaaaaaaatacgatattccattagttttaggttctgattctcactgtgcagaggaaataaataaatacgatattatttagatatattcacacaaaagactgtagataagtttgtataaaataaatttatgtacagtcttttgtaaatttatatgattgaaaatagtaatagaacttaaataaaataacaataagttctaagtaaaataacaatagaatctaagtaaaataataataaaattcaatagaataataggacttagaattaatctatcttatttatataaacattcttatataagattgtagataagattgtatttacacaaatctatagaccttctctattatattgacttagtaattataaatactattttgcgtttaaagttattatttcataagtttatcgttttccattattatagggtcaggcaattcaatttcaccttctgacatcttcaatctattaaacatataattttttacaccttttttatttttaaatttagtaacttgataaggtgatgtaacaccatatttttctaaaaatagaatgccatttttagttttaatacatatgcctgtatgacctataaatacgtttttagtttctggataacgaagaaatccatttataatagatatatttttattatttttaaaagatatttttctttttttccattcattttttatttgttctgcaattttgattgtatcatctgtatctttagctggtattgcagaaaagaagttgataaatttttctacatctttggtgctaaatttagcatctttattattcattatagtgtctaagtcgacattcaaatcaatagagtctccagtaaatttcttatttgaatttataaaatctttaaaaagtctaaaagcagttattctacaatttacatccatataatcagggaattttttcacccaattatcttgcaatttttctaggttatatggaacttgttttgcattgattgaagaatatccagatttagatatatttatattattttgaagtattttaacttgcaatttattataattgttgactgctttaataaatgtatctatgtctttttcattaattttattttcttttaggatttcctttacactattttgagtttttttatctatcatattagaatatatcaatttattattattatatttaatatttgaatatgcaaatatcgtaagtatacttgatagtactaagacaacagacaatatcattattattaatctttttttcatatttagttctcctttttaaatttattgtgtcgacatatttatagtatatagtacctttaaatttaccttcaatatgtttttaattacaaaactgttgtaaaaaatataactttatttaaaacttttttttaatatataaatatatatactaatagggggtacttatttttagaatattcagtaaaataattttgatatactctatatattttgtatgttaaaagtaaataaattattgttaaagaatgtaaagacttttaaattttttatcacaggattttaagtaaataagaaggattggagtaattaaaaatttttattttgcaaaaataagtatttatttatatggataaatttgattttaaatctatcaatatagataaaatcttattatttaacttcaactattccttaaaaaagcaacttttaaggaatagttgaaacaaaaagtttggttacataatagtaattttagttacaagaatgaaactgtaaaacttaggattttctttatataatttcattgagaacatttaatttaggaggtaaggtatgaaagtaaaaaaatttaaaagtggtatagtaatggcattaacagtaatggcaattggagcatcattgacaaatgtatcagctatggaattaaacaagagtaaagagtttgaaactaaatacaatgaaatgaagagggattttcaagaggattatggaaaagaagacaaatttaatataacattggatgatgaatttacaaaagaagaagtaaatggagctaaagggattataaagacaactaataaaatgaataatgaggttgtagtattaaattattttgatgaaatgaaatctgggattgaatttgagttgaaggcaaaagcagaaaaaaatgcaattttgagagatgaatttcaacaaggttatggaaaggaagataaattcaaagttgtgttagatgatgaatttacaaaagaagaggtaaatggagctaagggcattataaagactacagataaagagacaggtgaggttatcgtatataattactttgatgagcttgaaaaataatgcttaaagattactttgattgaatgaaaaggtaattgtgttgagaatattaaatgactgaataaaaacagttgtatcaaaaacaaacaataatagaatgtaagaatgattgtgtcgaaaatattaaatgactgaataaaaaatagttgcgtcaaaaacaaacaataatagaatgtaagaatgattgtatcaagaatataaaatgattcaacaaaaaacgattgtgttaaaaacaaacaacaatagaatgtaagaatgattgtatcaagaatataaaatgactgaataaaaacgattgcgtcaaaaataaacaataatagaatgtaagaatgattgtatcaagaatataaaatgatttaacaaaaaacgattgtgttaaaaacaaacaataatagaatgtaagaatgattgtatcaagaatataaaatgatttaacaaaaaacgattgtgttaaaaacaaacaataatagaatgtaagaatgattgtatcaagaatataaaatgactgaataaaaaacgattgcgtcaaaaataaaaaacaattaaatgtaagaataattatgtcaaaaatataaaataaattaaaagaaaaagattatactgaaggaaaaagatttgaaataggggtgaactttacatattatagttcacccttatacaaaaatataaaatataatttattataggaaaatttaaaaaaatcagtctatttaatttatactgatgtattgtaggattttacaaacaaactgttatataactttttttatctccaattttgattttaagatatctaagaatttataacaatcttctggatatatttctcccatatttgcaacttggaatatgttagcatctaggaatttgccttttcctggatagacaacatagccactttccctttctaggcctaatataaactcatttacattgatttctttaggtagaaatacagatgttactgtattagacatatacttatctggaagtaaaaatgttagccccaattcttccatgccattccttaaaatagcagaacattctttgtatctttctattttactgtcatcttccaaaaactcagttaaagcttcattaagggcaaatattaaagtaacattaggtgtatttggtgtttgagaagatgatttagcaactttatagtgtttataaagattaagatatacattcttacattgattttctttaatattttgtaaaatactctctttagcacaaaggtatgcagaacctggaaatgctccaagagctttaccaccaacacctgttattatatctatattaaactcttctacatcaatatattcacctgctgaggcacttattgcatctacaaaaaatattttgttatacttcttagcaagttttcctagttcagggactggatttatcattcctgaactagtttcatggaacaccatagcaattacttttatatcagaattttcaattatatatttttctaaaatgtccaggtctgggtattctgcccattcaaaattaggcttatatgtttttacattataagtaaataatatttcttctagcctttctccaaaaacaccattactaactagcagaactgcatcttctttgtcaaagatagaagatagtacacattcatttacagatgttccagagccagatacaattaatgagtagtaattagaagttgcattatatagtttattgattttttgttgtgtatctttgaataaatccataaactcgtttcctctatggcatatatcatagtgaagaagtgaatttctgactttatctgtaaccattactggtccaggactgaatagatatgtttttttcattgtaaagcctccttaaaaagttaaatttaaattttcgaatgactgactatgtgtaaatattaaaatattgtgtgttattttaactagattatagaataaaataatgaatattgcaataatatttcaataaaaatacttttttaatcaccataattaaaaataacaaaaaatattgtaatgaatattgcataaatccacatgatgatataaaatataaataacttgaatagattatatattcaaaaaataaaaaagaatttattaattctgaaaataaagggggacattttaagtgaaatatgtattagcaattgaccaaggaacaacaggaacaagagcagtattgataaacgaaaaatcagagtttgtttttagcgattatatggaacatactcaaatatatccacaatctggatatgttgaacatgaccctatagaaatttggaataatacaaaaactgtgagtaataatgtattacaacaggcttttgaaagtggaatcaatgaaagtgatataaaaggaattggtatagataatcaaggtgaaacagtaatgttatgggataaaaatacaggtaaaccactttacaatgctatcgtatggcagtgtaggagaacttatgattatgtggaaaatttaaagaatataccaggtttagaaaataagataatagataagactgggttaattatagacccatatttctcaggtacaaaaattaaatgggtaatagataatgtaaaaggtgtaaaagaaaaaattaaaaatggagaagtacttgcaggaacattggatagttggttaatatggaaaatgacaggaggaaaatcttttttaactgatgtatctacagcagcaagaacaatgctttttaatataagagatatggattgggatagagagttgcttgacattataggagtgcctagaagtattttagcagatataatgcctactagtggtgattttggaactacagataaggaggcattttgtggggtttctataaaaattactgcttcaatggtagaccaaccagcagctttatttggcaatggatgttttgaaccaggaatggttaaaaatacttatggtacaggatgtttcttatatatgaatataggtgaggagttaaatatagcaggtaatggtattttgacaacagttgcttggaagataggagataaagttacatatgcttatgatggtggagtgtatatagcaggtgctgcaatacaatggcttagagatggaattggagttataaaaaattattcagaaactgatgacatggcaaattccatatcaagtactggaggggtatattttgtaccagcatttgcaggtatagcagcaccttattgggaccaatatgctagaggcacaatggttgggataacaggaagtactaaaaaagaacatatagtaagggctactcttgagtctgttgcacttcaagtcaaggatgttgttgattccatgaatttggcttcagggaaagaaataaaaatgttgagagtagatggtggaattactaaaaataactttacaatgcaatttcaatctgacatattagatataccaattgaaattgcagaaaatcctgaaacgacagtacttggtgtagggtatatggcagggctttcctgtggtgtttggaacagtattgatgaaattagaagtgaatttacaataagcaaaaaatatattccaaatatgactaagcaaaaaagagaagaaatattacttggatggaatcaagcagtaaaaagagctatgaattgggaaaacgataccaaaaaggtgtgtgctaattaagttacaatagagtattttacatgtataggaggaattaaaaatgccctttgataaaattatattatacataatggctgtgggagtgcttttaggagcgttagatagaataattggaaataaatttggacttggagagcagtttgaagaagggtttaattcaatgggtccattggctttaggaatggttggtatagtttgtttagctccagtaatttcagatgtactaggtcctataataataccaatattcaatctctgtggagctgacccatctatgtttgcaactattttagcgaatgatatgggagggtatccattggctatggaacttgcacacaataaagaggcaggaatgcttgcaggattagtcgtgtcatccatgcttggatgtacattagtattttcaattccagtaggactaggtcttatagaatatgaagacagaccattctttgcaaaagggttactgataggcttgataacaataccttttggaggtattataggaggattaatagcaggatttaacttatcaatggtaattataaatatgataccagtgataatattggcagtaatattggcagtaggtttaaaatttaattctacacttatgataaatgggtcattagtttttggaaaatttatatctatattgataacgataggtttgggagcagcagcatttcaagaaataacaggtatagtacttataaaaggcatgacacctataagagaaggtattcaagtaattggaagtattgcaatagtgttattaggtacttttccaatattacatttattagttaaagttcttaataaaccacttacaatagtgggtggaaaattaggtatggatgccactagtgcagcaggattagtttttactttagccaatagtattccagtatataaaatgatgaaagatatgagtccaaaggggaaagtagtaaatactgcttggctggtttgtgctacagcagctttgggggaccatttaggatttacagcaggagtagttccagagatgattacacctgttgtaattggaaaattggttggaggagtattggcaattgcacttgctatacttatgacaaaagatttaactttggaagaagaacaaagtattaaaatgaagaaagatgcagtgtagaataaacaatacttaagtcaaatttaagttattttaaagtaggagtttaaataactaaaaataaattaaaaagacagacaattaaaaaataatcgaataaccaaaactgataaattaaataaaatggcaatcaaataactaaaaatgataagctaactgaaagtagttacataattaaaatataaagtatagtttagacataagtggagctaaataaataattatttggctccttaattttaatttattacatcaaggaactaaaaatcaatcatacaagctaattatcagctatgactaaaggtattcctttttgagaaaactctattattatattatggtctatactagcagaggtaataatagtatctatgtgttctataggagctactgatgcaaatgaatttataccaaacttaggaggttcgacaactactatagattttctagacctttcaatcattttttttctaaccagtgcttcttctaagtgatagtcagagattccattttcaagagtgatacctccagcacctaaaatagctttatcaacattaaattgttcaatagctgagagtgtaagtggaccagaaaaagaaccttcagtttctctaagatagccaccaagcacatatacttttatattagtattcataagttcatttgcaactaaaattgagttggttattacagttagattctttttatctttcaaattttttgaaacttcaagtacagtagttccagtatccataaaaatagtatcatttgtatttataaactcactacatttaatagcaatctgttttttatcgtttgagtttattttttttcttttaacatagttaagttctacgctacttgctataactggtatagcaccaccataaactctttttaaaagaccgatactttccatatgggctaaatctcttcgtgcagtttctattgatatatcaaacatttgaactatgtcatttattttaattatattatctgatttgagaatacttaaaatcttctcgtatctttcctgtggtaacataaaatatcctccttggactagtattattttagttttggcataacttacaattaagtcagagtttaggtatatttgttaatgtatgtatatttatcaaataatattataagtgttatgcaagataattttaccatatttaaaacttacatttaagcaaaaaagtaaaaatagatgtttaataattcaaaataactcaaattttataaaacaattgactaaaatatgattttattatataatttactagtatagagatatggagaagtactcaagtggctcaagaggatcccctgctaagggattaggctgggtaaccggtgcgagggttcgaatccctccttctccgccaattgttaaaggctatttttattaaagatagtctttttataatgtcataaatgattagatatgtataattaaagaaaggagggaatagatgacaactttaatttttttcatagtggggatagcatctttggtagttgcttttgttattgatgggggacatattggagtattatttgtattttcatcagcacttgttgtgtttggtggaactataggcgctgttggagcttcgactccattccctgtgtttaaaaagtctataaagataatgttattagcttttaaaaataaaaagcctaataacatagaaaatataatctatttcaaagaaattgcaacaaaggctaggaaagaggggcttcttagtgttgacaaagaaataagtgagaatgatgaattagacccttttattagaaaagggcttgaacttatggtagatggggtggatgcagttactataagaaatatattggaatcacagatacagataacatcaaaacgacataaagaaggaatagcaatttttgattcagcaggtggatatgcacctacactggggataataggtacagttatgggattagtacatattttaggtaatctttcaagtaatccagatgcattaggacctcaaatttctgttgcatttttggctactttgtatggtgttggttctgccaatttaatatggttaccaatagcatcaaaacttaaggctataaatcaacaggaaataagtgaaagacttttggtgatagaagcaatattatccatacttgagggtgataattctaatttaatgacagaaaaattaaaaatatttttaaattcaaaagaactaattgaacttgaagaaattggtggtagagctgaataatataaaaggatggaatgtttatgttgtatgatgaagatgaaaaagaagaaaacaatgagcgatggcttttaacttattcagacctcataacattacttatgattttctttgtaataatgtattctatgagtaatgttgatgcggagaaatataaacaattatctcaatctctaaattctgcttttggtggttcttctggagttattgaaggtggtaatagcaaaatagaaccagtagttgaaccaggaagtaatgatttagatagtttacaaaatgctaagtttaaaaaagttggtgaagaaatccagaagtatttaaatgaaaatggtatggctaattcagtatcattaagagttcaagatagaggattagtaataagccttaaagatacaatactatttgatacaggaaaagcagttgtaaaggataattctagagataagattattcaaataggtaagatgttaaatgaaatgaatagttacatgagagtagaaggtcatacagacaatatgtctataaaaaattcagagtttaagtcaaattgggatttatcagttatgagagcaaccaatgttgttcaacttcttattgacaatgcaggtatagcaccagataaattatctgctgtaggatatggtgagtttagaccaatagcagaaaattcatctgaagaaggtaggtcaaaaaatagaagagttgatatagttttagttgatagtaaatatgataatgtagaaaatgtttcaaaggataaatagttaaattagctgtctcaatacagaattaattctaaaggagatggcttttttatgcgaaaattaaaaatagatacatagtaagttacctttttgtaggaatatatggtatcttaaatatataatatttaaataatatataagctcaattaaaaaaattttatagaggatgggaaataaatggggaataaaaataaaaatacgaaatataaagataaaacaagagaaagatataataaaaaagttgagaatttaaataaagaaaaattaaataaagataataaacagtctaagaaggtagataagattgatgatattattaataaatctagtattgtattatgtgtacttctagtggtgttttcattactttacttatttaaattggttcaacttaatataataatgatacttttagtaattacagtagctattcaacaaggattggtgtcatttggtgcatttagaaataaaaattatgtaaaagctttattttctatatttgtaatagtatgtttcttaattgcttttaaatatgttgtaaatcctgtttaaatatatcaataaacgttctataattaatataaatagtgaagttacagttttaatgctattataaattttataatttgaaggagtagattttatgaataggtgtaagtttgcaaaattaattatcacatcaatgattgttttattacttacaggatgtagtttaaaaaaggaagataattataagttagacccagaaaatccgacatcaatacaaatttggcattattataatggacagcaaaaaatggcttttgataagcttgttaaggaatttaatgacactataggtgctgaaaaaggaattattgttgaagcgtttagtcaaggtaatgtagttgatttatcagagaaagttttagattctgcaaataaaaaagttggctctgaagatgtgccaaatatatttgcagcatactcagatactgcatatgaaatggataaattagggttactagtagatatggataagtacataagtaaagaagaattaaatgaatacatagacgaatatgtagaagaaggcagaataaattctaaggatgagtttaaacttttcccaattgcaaaatcaactgaaattttgatgttaaataaaactgattgggataaatttgcaaaagctacaaattcaaatataaatgatataaaaacaattgaaggattagtagagacatcaaaaaaatattatgaatggacagatagtttaacgaaagagcctaatgatggtaaagcattttttgggagagatgctttagcaaattatattattataggaagtaaacaactaggagtagaaattttttctgttaaagatggtaaagttacactaaatattgaagaaaaagttatgaaaaagctatgggataatttctatgtaccatatataaatggatattttgcttcttatggtaagtttcgttctgatgatgcaaaaacaggtgatatattagctcttgtaggctctagttcaggagcagcatactttccagatagagtaatgctaaatgataatgagagttataatattgaaacatctgtttttcaagcaccacgttttaaaggagaaggaaaatatgctgtacaacaaggtgcaggaatggctgtaacaaaatctactaaagaagaagaatatgcatcagtagaatttttaaaatggtttacagataaagagcctaatataaaattctctattgcttctggatatttaccagtaaagaaaaaaacgaatgatttgaatgttataaaagaagttatgaagaaagataatttgagtttatctgataaagttgaaggttcaatagcctcatctattgaacaaattaacagttgtaatttatacactaataaagcatttgatggtggaactaaagctagacaaatacttgaatattcaatgcttgataaagctaaagaagattcaaataaaataaatgaattggtaaaaagtggaacttctaagaaggatgcggtagcacaatttaataatgataagaattttgaaacttggtttgaaagttttaaggctgagcttgaaaatgctataaaaaaatagatgaattggcagttagtgtgtagacaagcacaaaggtataggtggaataagtatggaaaacaatctaagaaaaaacaattcaataatgaaaaagatgatatttcccctaattattgttatgctaattcaaacaagtttattttgtgccacaattttatggggaggaactattaagaaattaaatgataattcgtttgacatcttaaatgaaagagtaattaatcgtaaaaattatatacaaaatgaaatgttacaaagatggtcaaatacaagtgaaacggaagctacaattaattcctctgtaaaaaaaatattaaatgaaaaaaatgccttaattgaggatgtaggcaacaatgaagaaattaacaaagatattataaaaagcatatcaaatgatttaatatatcttttgagaaaaaactctgttacaggagcttttataattctaaatgacaaaaatattaacgataagccaatagatagtaaaggtgaaataagtaggactggattgtatataagggatttagaccctaagtttaatccaaatgataattctgatttgttaattgagagaggttcatcagatatagcaagaagttttggaatatctatggacagttattgggaacctaaattttcatttaaaagtgaaaatgagcaagagggagatgattttttttataaaccatttagagctgcaattgataatccaaacgtatcaagttctaatttgggatactggggaagtaagtttttattgacaaatgcaggtgataggcttatgacatatacagttccccttatttatgaagatggaactgtatatggagtacttggaatagatttaagtgtaaattatttaagagaattacttccatactcagagataaatggaaataaaaaaggtaattatattttaggtgtagatagaaataatgatatggcctttgaaaatgtaatttcaaatggatactcattaaaagaaaaattttgggatggtttacattctaatttagagcagaaggaatcgtataaaaatatatataagattaaaaataaagataatgaatgtggtaatggcaacatttatgctagtgtacaatacttagatttatataactccaatactccatttgaaaatgaacgttgggctcttttgggtattattgaagaaaaaagtcttttgtcattttcaaaaaggatagagaaattagttataatatctatagcaatttctttattaataggtctaataggtatttacattgcatcaagattatttacaaaaccaattgttcttttagccaacaaagttagaaacagtaatccatcaaaaccagtaaatcttgataagataaatatatctgaaatagatgaattatcttcagctatagagttactcagtgcaaatgttgcagattcttcatcaaaattatcacagattattgaaatggtagatatgccaatcggggcttttgagttatacaaaaacgcagagaatgttttttgtacaaaagataaaaaacttaagtggataagaatgaatatctttgaagatgagctaaaggttcttggtgttgttgttgatgtcacaaaagaatttattgagaaaaggaagatagaatatgaaagagattttgatattttaacgaatcttttaaataggagagcttttcattcacagatacaagaaaaatttaagaataaagatgaacttaagatagcagcatttattatgtgggatttagataatctaaaatatattaatgatacatatggacatgatgctggtgatgaatatattaggtgtgctgcagacatacttaagaagtttatatcatggaatggtatagtatctagactttcaggtgatgagttttatgtatttatatatggatatgaaagtaaagatagtataagagatattattaattctgttaagaaacagatgaataataccttattaaaacttcatgatggaacagaatttaaaataagggcatcagcaggaatttcctggtaccctgatgattcaaccaactatgatgaattaatgagatacgcagattttgctatgtatcaaattaaaaatacaatcaagggggaagttagtgaatttgatattaatatatataataaggattcattcttattgagtaatagagaagaattaaacaagttaattgatggtcaattagttgagtatgcatttcagcctattgtagattgtaaaggtaaagtatttgcatatgaggcacttatgagacctaaaataaaaacttttagttcaccaatagatgtaattagattagctcgttcacagtctaaattatatcaaattgagcgtattacatggtttaaagcacttaaatcatttaaaaaatacaaagaaaaatttggcgattgcaaactgttcttaaattctattcctaataataatttatcaaaagtagattttgaggaaattgaagatttatatggtgaatatttaaatagagtagtattagaaataacagagaatgataagattaatgaagattttattgagaaaaagaaagcatatatagaccattggaatatagaaattgctttagatgactttgggacaggttacaacggagatgctgtactattatatataatgccagactatgtaaagattgatatgtctattgtaagaggtattgataaagatgaaaacagacagaaaatattaaaaaatcttatctcatattctaacgaaagaaatattaaagtgatatcagaaggtgtagaaacaaaaggtgaaatggaaacactgattaatcttggagtagattatatgcagggttactatattagtaaaccatcatttatacctgaagatataagtgacaaaattaaaaaagagctcaagatatgtcatgaaaataggaatgatgtggtttaatagaggaaaaattaaatttatttttatgaacttttagtttataattaaaaagaaaataatataattataaattaaggtggtggagctaataatcacaacaaacatagatataagaaagttaaatgaaaatcaattagaagcagttgaacatatagatgggccttgcatgatacttgcagggcctggttcaggtaagaccagagtaattacatatagaatagccaatatggttgtaaacaaaaatatagcaccaacaagaatcttggcaataagttttaccaaggcatcttcaatagaaatgaaaaatagagctttgaatttaagtgatgatataagacttaataaggtaacctatggtacttttcactctgtattttttaaaattctaagatactttgaaagatacaatttagacagtatatttgatgaaaagtcaaagcgaatgacaatcaaggcaatcctaaaaagtttaaatatagagaatgctgatgatgatgagaatataggacaagttataaatgaaatctcctatgtaaaaaatgaacttatggataaaaatgaatttaattcagaagtattaacaaaagatgagtttttaaaagtatacaacttatacgaagaacaaaaatctaaagttaacaaaatagattttgatgatatgcttataagaacttattatttacttttgaacaataagtctgcactagaaatggttagaaatgtgtataaatatatattgatagatgaatttcaagatataaataaagtacagtttgaagttttaaagttaatttgtagcccattaaacaatatatttgcagttggagatgaagaccaaagtatatatggatttagaggtgctagaccagattttttgcttgaatttgaacaatactttaataatactaaaaaaataatattagatataaattataggtctaaaagtgagatagtgtatactgcaaatagacttatcgacaaaaataaaaatagatatgaaaaagtcattaagtgtagtcagggggatggaggaagtgttacctacatttctccacatgattcagaggaagaagccttatatattgccaaggaaataattgacgaaatacaaaaagattatgtagagtattcagattttgcagtaatttatagaacaaatatacagtcaagagcattagtagatgtatttatggatatgaggattccatttgtagtaaaagactcagtaattacaatatatgaccattgggcaagtcaagatatactagcttatttaagaataggtattaatccaaaatcaaataaagattggttgagaattataaacaagccttttagatatatatccaaagacagtataaatatggttaaggatgaaaaagactttataacagcattaataaataagtgtaatcttcatcctaaacaagttaaaacaataaatgatttggaaatagatttaagttatttaaatactttaaatcctaaaaatgcaatatcttatattagaactagtcttgattatgatagatacgttttagattattgtagcaacagaaagataaaaactaatggacttgtagagatattaaatgaacttgagagttcagcaactaattttaatactgttacagagtttttagagcatattgatagagtaaagactgagttaacggaaaataacaagaataagcagactgagggtgtcatatttacaactatgcatagtgcaaaaggattagaatttagaaatgtttatattataggtgtaaatgaaggaacaatacctcatgaaaaatcatatgatatttgtaaggaagagaaaaaagaagaacaattagaagaagaaagaagacttatgtatgttgctattacaagagctgaagaaaagttatgtataagctctactttaaataagtatggtaagaaagttgataaatcattatttattaatgatataaaatctccaacgaaaaaagaaattgacagtattggtgtaggggataaggtataccataaaaaatttcatgaaggagaaataattaaaaaagatggaattatgtttacaataaagtttaaagatagagagcgaatcttggatttgaaaacttgtttattgaagaatataatttatactatttaatttagaatctaaatttagatagaaatataatgtattatttattatgtgcaagacaaatagatatgtgtaaaatgtattatttaacttattagaaaaagaaataaggatttaatatattatttatagttgtttagaaaaagcaacaatgtggaaaatattatttagtattattaaagaaaagcaacaatgtgaaagatattatttagtgtaatttaagaaaaagcaacaatgtgaaagatattatttagtattattaaagaaagagcaacagtgtgaaagatactatttagtattattaaagaaaaagcaacagtgtgaaagatattatttagtgtaatttaagaaaagcaacaatgtgaaagatattatttagtattgtttaagaaaaagcaacaatgtgaaagatattatttagtattatttaagaaatagctaaaaatatgaaatatactatttataattacaaaaataatatcaataaatataaacagtagtatttagataatttacaagtaaaaattattaaaaaaataaaaaacttattgacaaaaatattataaggaagtacaattgtattaacaatttaaggaaacaaatccaatgatagagaaagtagcatatatggatttacagcgagttaggggttggtgtaagcctagcaatgaagtctatgtgaagagagctctggaggagattatcagaaactttagtatgataattggtttacccgccttaagggattgagaggataagtacttacttatcaaaaagagtggtaacgcggatataattcgtctcttagctgtaaagctaagggacttttttgatttaaaaataaaaatatccatacagcttaaatgctaacagtcacaaattttgaaagtaatataagtatttatcaataagagtggtaacgcggtaaagtcgtctcttagtcattaaagactgagagactttttttgtaactcgaaacatttaagtattaaaatctgagggaaattataattaaaagagaggggtagttaaaatgaaagtatttaaaaaattattaagtttaggattagtattaggattgacattatcgctagtaggatgtagtggtggaggagaaaaaacaaagttagaacaaataaaagacaatggaaaattagttgttggtactagtgcagaatttcctccatttgaatttcataaggtagtagatggaaaagattcaataaaaggattcgatataatgttggctgaagaatttgcaaaagagcttggtgtaaaggttgaaattaaggatatgtcatttgatggattaataggtgctttaaatgcagaccaagttgatattgttcttgcaggtatgtctccaacaccagagagagaaaagagtgttgatttttcagaattatattatttaagtagaaatgcagttatagttaaagatgcagatatagacaaagtaaaaactgaagatgatttaaagaaacttagagttggagttcaagcaggaagtatccaagaagaatatgtagttaacactttaaaaatgacaactacaaaatctttaaaagcaatacctgatttaattacagaattaaaaaatggaaacatagatgcagttgttactaatgaagcagtttctttaataaatgttaaaaaatatgatggaataaaaatggcaaatactgaagttggtaaagatgtaacagaaggtatggcagcagcaatcaaaaaatctgacaataacaaagattttatagaattattaaacaaaaagataaaagaattacaagatggtaagaagatagaagaatttttaaatgaagcatctactgaagctgcttcaaattagtaagaaagttatgtgggagatgaaattatgagtttagattttagttttttaagtagatttgggacttcttttttggaaggaacaggtgtgacagtatcaatttctcttgtggcattatgctttggatttataataggtataattatctgtatggcaaaaatatcaaagagcaaagtattaagagcaatatcatcaatctatattgaggttttaagagggacaccattattagtacagatatatatagtatggtttggtttacctcaattaggaataagattccctatgttgtttggtataccaagtgaatttatagctagtgcatttgcattatcagtaaactctggtgcatacgtggcagagatacttagatcaggtatacaatcagttgataatggacaaatggaagcaagtagatcattaggattaaattattggtcaactatgagatatataataatacctcaagctataaaaaatatattaccttcattagcaaatgagtttattacacttgtaaaagaatcttcaataatatctgtaataggagttgttgagataatgcgtactgctgatatagtaaaaaatgcagcatttagagcattagagccattaatagtagcagcagcaatttactttgttataacatttactctatcaagattagttggattattagaaaagaaactatctgtgtctaactagatgagagcatgtttagcatttagggaaaacatagaatagtaaaaaggaaagtgataatatgattacaataaaaaatttaagtaaatcttttggagatttaaatgtattaaaaaatatagacttagaaatcgctaaaggcgaaataatggttatagtaggtccaagtggttctggtaaaagtacacttcttagatgtatgaatttactagaaatacctacaggtggagaaataatatttgaaggaaaaaatttggtcgataaaaaaactaatattgatgaggttagacaaaatataggtatggtgtttcaaaactttaatttattcccacataagactattttagataatataacattagcaccaattaaattaaaaaagatgactaaggaagaagcagaaaaaaaagcagaaattttgttgagtagagttggtcttttagataaaaaagattcatatccatcacaattatctggaggacaaaagcaaagaatagcaatagctagagcacttgctatggaaccagatatgatgttgtttgatgagccaacatctgctcttgacccagaaatggtaaacgaagttttggatgttataaaagaacttgctaaagaaggtatgacaatggcaattgtaactcatgagatgggatttgctaaggaagttgcagatagagttatttttatagatggaggaagtatacttgaagataatactccagaagaagttttcggaaatccaaaacatgaaagaacaaaagcatttttagcaaaagtgctataatatataaaaaggatgttattgatattagaaattcaatacatccttttttagtgatggttaatattaattttaaaattaaagttatattaatattaactttatttttacgattttttgcagaaaaaaaaagagctcggggtaagctctttttttccaccgaattaatttccgttactaatccgatttttaataaatataaaatatatccttatgaaagggtattgggaatagatatattaactaactagggttaccagggggataaccttaatttattataacaaaatgcgacacaaaaatcaatattttttttgaaataaattataaaagttatttttataacaagtaagcttataaatttaacttttatagtaaaaataagtatatgtataatataatatatttattttatataatatattattttatcatatattgtattttataatatatttttgtaaggtatagtataagtatattatattttactataaaaatttgtaataaagtgaaaaaactagcttttcatgaaataatattttataatttaagattgtctttttaataaagattaacaaaaaaaatactataattagtggtataatagttagagttgaagattttaaataaaggtaggtgtaattaagttggaaatatacttagacaatagcgcaactacaaaaccttatcaagaagttatagataaaatggtttatgcacttaatacggaatatggaaatccttcttctgtccatagaaaaggtgtagaagttgaaaaagctataaaagaagtaagacaagatatagctaaatctctaggagcgaaagaaaaggagatttattttacatcaggtggtacagagtgtaataatactataataagaggtattactagtttaaataaaaaaagaaaaaatcacataatatctactaacatagaacatccttctgttttaaatacattaaaagatttagaagaagatggttttgaagtaacttatttagaggtcggaaaagatgggaaaataaatatagaggatttaaaaaatgcgataaagtcaactacatgcttagtaagcatgatgcatgttaacaatgaaataggaactatacagccaataggtgaagttggaaagtatttgaagggtttaaaagaaaaaatttatttccatgttgatgctattcagtcatatggaaaaattaattttagaccatctaaatacaatatagattttatgagtgtaagtgcacataaatttcatggtccaaagggaattggatttatgtatataaaagaaaataatcgccttaagcctatgttaacaggtggtggtcaggaaattggaattaggtcgggaacagaaaatgtacctggaatatatggtcttggagaagctgttagaatactaaacaaagatttagatgttgttatttcgaaagtaaataacttaaaaaatatattaaaaaatgaaataattgataatatagaagatataaaaatcaattctccagaagatggagtatgtcatatattaaatgtatcatttagagggacaaaaggagaagttttacttcattacctagagcaaaaaggtatttatgtatcaactggctctgcatgttcttctaaaaagaaaggtagttacgtattaaatgctataggtcttacaaatgaagaaataaatggaacaataagatttagtttatctgatatgaatacagaagaagaaatgttagaagctgtgaaagttttgaaagaatcaatttgtgacttaaggtcaataatgaaaagaaaataaagaatactgtatagatagtgataataaattagtttaagaggtgaaatggtgtataatatattaatagtaaagtatggagaaattggagtaaaaggaaagaatagatatatatttgagaataggcttataagaaatataagaaatatgttaaaaccaattggaagatttaatgtatataaagagtatggaagaatatatgttgatttagaagactatgattatgaagaagtaattgaagaagttagaaaagtatttgggatagtgggtgtgtgccctggagtaagagctaaaaaagattatgatacattaaaagaaatagctttaaaaatgttagaagaaaaaatagaggctggatataaaacttttaaggtagagtcaagaagaggagataagtctttcgggttgacttctcaagaaatgagtatggatataggtggatacttattatcaaaggtaggagataggattaatgttgatgtaagaaatccagaagttaaaataaagtgcgaatacagagaatttcatactatggtctatagtgatactatacctggatatggtggattgccacttggaacgaatggtagagctatgtctcttttatcaggaggtatagatagtccagtagctacatggatggttgcaaaaagaggtatggaggtagaggcagttcacttccatagttatccatttacaagtgaaaggtcacaggaaaaagttaaggatttagctaaaatactggcaaaatactgtggtagagtaagacttcataaagttaacatattagaaatacaaaaagcaattggtgagaattgtaatgaagaagaagctactattctttcaagaagatttatgatgaggatagcacagagactttctgaaaaaagacattgtgatgctttaattacaggtgaaagtattgggcaggttgcatctcaaactatacaagggcttacttgtactaatgccgttgtagacttaccagtgtttagaccacttatagcaatggataaatcagatatagttgatatagccaaaaaaatagggacttttgaaacatctatagtgcctgaagaagattgttgtagtgtattttctcctagaaagcctgtcactaaacctagattagagaaaatagaaaaatctgaaacagcacttgatattgaaaaattagtacaggatgctattgacaaaatagaggtagaggatattgagttttagcatacaagttatttaattactaaattgaatattgagtatattagtagttctgtaagtatattagtagttctgttgaaaggatttatgtagacaatttattaatatatagtatttaaaaataagtactataattttatttaatgggaatgattattatgaataaaaagggttttacattaattgaattgttggtagttatatctataataggaattttagttatagtagctgttccagcgttatttagaaatatagaaaaaagtaaggcagttacatgtctttctaatagagaaaatataaagactcaaattgttattgcaatggctgaggaatcaagtaaagacaagaatgaagtcataaaagaggtattagaaaacaaagatggtaagtactttgaaacagaaccaaagtgtaagtcaggtggaatatattcagcaacgtttgatgatggttatgatggaataactggaatagaaagcattgcaaaagtgtatgttacttgtacaaaacatccagatggtattgaaatggctagggatatacatcaaagtatgaaagatttgattgcatcatttgcacaagacccttctataataccaggagcttcaaagggcaatgatgattttagaaaatatttattagacaataaatataaaaatgggtggcctacaattccagatgaatttaaggcaaaatatggattaagtaaggatacactatatatacaaccatatgcatataatcctactaaatctgatgctactgtagttgtatttgcaaataataagactggaggtaattggtatacttccctagtttacgattatgatgaaggtagatggtataaaggtaaaaatggtatttctgttgcaggtaggtcatgggatgttgacacagatagtgttaagtctgtaaaaacagagattcattctaaagagggatggggtcctttaaattaatatatcatgttttattaatctggtattgattaaactatagaaaagagcagtttctatagatgacgaataccagattttcatttatatgtataattaagatatattaaaagtatttatatttttaagtcttcacatacaagctaaagataattataataatattgtaaagaaatttaattataagattaattttctgaagatttagtatttgtactaagaaatacataaaaaggggaatagatatgaataataattttcaagacaaccaaacaataaatttaatacaaagtcgtagaagtatacgaaaatttacaacagagcaaattagtgatgagcaagtaaacacattattacactgtgcatttgcagcaccttcaggatgtaataaacagccttggcacataactgttgtgcaagaccagaaacttttaaaagagattagtgatgatactttatctaggattcatgaagtgagtaatgttgagataaataaaaactttaagttattttatggtgctccaaccgttttatttatttcttatgatgaaagtagttcatgggctccatatgatataggaatacttacagggaatataacaacagctgcacaagcactagggcttggaagttgtataataggaatggttagaggtttatttacacctgttgaacaaggggatattgaaggtcttgtgagtgtattggataaagaagatgtaaaggaatcagagtcaataaagatgaagtttgatacaaataaaaaatacagagaactacttgatataccagaagggtattctgtaccatttggtattgctgtaggtattccagatggaaatttaccaaatgctagagaggtagtttacaaagtttccagagtttaggataaagtattgcaagaaccaatcagttacttgaagaattaaaccagtaatatacaaataaattgatggaagaggaagctatttaaaaagtagtttagatttttcattgtaaaataattaaataaagaataaggtgataagtattttatttattatcttattcttttttatttttgttttgtagaatgataaaaataaggattaagtgtaataaaatagaaaacaagtatgttaattttaagtatatgctttaaaatttatccaagttaaaaatttaagatatcttttcagtataatggaaaaaatgtcaaaatattgaaatagggaaaaaatagtgatataataaaaaaaatagagaaaaaaagtaacccttagttgtaaaaaagttactatttattgaaaatttagatacttttctaaaaattatctatgttaatagttaaatttatgaacattttttgtttttatgttaggatatttcttagaaatgaaatacttcttaatttgatttgatatgtatatttttatagctattttattataaaaaaaaagaacccttttacaacaaatggaaactatgtacgtaataattaaaataaaaaatattattttatatttataaacattgacattctaattctgtagtgtaatcgtattttttattaattcttataaaatcaatgaaaataaggatatccattttaaagtacataaatttaaaaatccagaaaaatatacttaaattatgtaagcaaaagaggggttgaatcggctgaaaatgtaatactagtaaatagtacatcaatcctagataccctgtaagcaactctattttcatgtactaaaaatgtacctattttattaactgaaaagaataaattaaatgtaagtacataataagagataaaaaattaaaagcaaaaaatatttatataaataaatataaaaaatgatataatccctattaaaaaatttatagatgatgaagaaatatcaaaatcttatattataggaagaggcacttctttgccaaaatatatagaaaagcaataccaaatccaaagagaataggctgagaaaaaataaaacaaattcaagagtaatagaaaagctttatagaataaagaactgagaactctttatataataaaaaatggacttttaagagaaaatgatttaataaatgatttaacatggtgttttagcaggtgaaaataaatcaccagtaatgattgtagaaaaattactttatgaatctcaaaaaaacttagttaagagtaagagatttgataagataactaaagttggggaaatgtgtttgatgagataaaaaaattagtaaaatagtataatctaaataagaatattttgttgattaaactacactaatagtaatattgtagggggaaaagatgagagaagaatcgaactctttaagtttagaccatatagaaattttctttgaacttttatctcaaagtacagaagattatatatttttttgggatataaataggaataaatttaaaatttcttcagcaatttttgatgaatttaacttaagtaaagagatagaatctgatttagtcaattgttggagtaaaattgtttatccggatgatgttcaaatatggaaagatgatatacaagaattactacatggaaaaaaaggtgagcacaatttagaatataggttgattaataaatatgaagaaatagtatggatttcttgtagaggtaaagtttatgtgtcggatgacccaaaaactatatttctagtcgggagaataaagaatattggtgaaaaaaataaatttgattctatcacaggaacgtggaatagagaacaatttgaacatagaatgaattatcttataaaagagaaaatttataaaaatggtgctatgtttatcatggatattgataattttaaaaatataaatgaaaaatatggacattcttatggtgacaaagtattgcgtgcaattgctactgaagtattagaatatcttccaaaagatgtaagattgtataggttagatggagatgaatttgcatttttttaccctatgtgtactaaagaaactatagagaaaatatatgaaaagatacagatgtatacaaatactcagcatgaaattgaatcaaataagtactattgcacagtgactgcaggagttgctatgtatccagaagatggagataattatttagatttatttaaacatgctgatattgcattggatatagcaaaaattagtggtaaaaatagaattaagtttttttcacaagagctctatgaaaataaactaaaggtaatttcaatgcaacaaaaactaagagagtgcgttgaaaataattttaatgactttgagctgttttttcaaccccaggtaaatgctgttacaaaagaggtaataggggcagaggtacttttaagatggcattcgagtacttatggagaagtatctcctgttgaatttataccaatactagaacagagtaatttaattataccagttgggaagtggattataaaagaagctgtaaaacagtgtaaagaatggcataaaataaatccagactttaaaatatctgtaaatgtatcgtatattcagttaaaagaagatttttttagagattttatagtagaatgtttagtagagtatcaattaagacctgaatttttaattttggaattaacagagaattgttggataccagatataaatttactaaatgataaatttattagtttaaagggtataggagtatatattgcaatagatgactttggtacagggtattcatctttaaattaccttaaagaactgtctgttaatataataaaaattgaaagaagttttgttaagaatattacatataatagttatgaatatacttttcttgaatatattattaaattagctcatattataaatttaaaagtttgtgttgagggaatagagtcttatgaagagtatgatatagtaaaaagcttaggtgtagatattattcagggttttttatttggaagacctgtaagtgcctctgaattttataaatttcaactatcaaagtgatgtacataaaatgagatatatagtatataaaaatagggcaaagtggaagttttgaagtttattaaaaatttacactttaccctattttgttatgtcttctataaaggattaatatactacactaactattatatactttcactccaaatttagagattatttcactagctttttggacatcttccttagtggcatcaggaacatcttttagttcataatcgatacctaaactttcccatttgtgtattcccatagaatggtatggtagcaattcaaatctttctacatttttcaatgtagctacaaattgacctagtttttctaaattatctatatcatcagtaatgccaggaactaaaacatgtcttatccatacaggaatatttcttgattctaagtgtctagcaagttttaatgccttatccataccaacaccagtcaaatcaatagatttttcctcaaccatatgttttaaatcaagtaaaaccaaatcagtattatctaaaactgggtctatagtttctatatctacgaatccagatgtatccaagcaagtgtgtatatcattttcttttgcttttttaaataattcacttaaaaattctggttgaagagtggattcaccaccagaggcagttatacctccaccagaaaacttcataaaagaagtatacttaagagcatccgttattatttcatcaactgtgtattcttttcctgatttaatatcccatgtatccctgttatgacagtatttgcatctaagaggacacccctgaaaaaataatatatatcttattcctggtccatctacagtaccaaacgtttctatagaatgtatctttcccttaatcatagagttcacctcacaatatattttaataaccttatcaatagttataatatttgtctaaaaaaggccatcttataccagaaataattcaaatataagatagccttttatttttattttttacacagtagtaatcttagttaaagtataaaaatttaaagactaagccattttaccgtggaatgttctgtttataacatctaattgttgctctttagttaattttatgaagttaactgcatatccagatactcttatagttaattgtggatattcttctggatgttccatagcatcttctaaagtagctctatcaaatacatttacatttaagtgatgagcattttgagagaagtatccatccatcattgcagaaagattgtttattctttcagtcatatcttttcctaaagcagcaggtactatagagaaagtattagatataccatcttgagcatgttcatatggtaatttagcaactgaagataatgaagctaaagcaccattagtatctctaccatgcattgggttagcaccaggagcaaatggagcaccagctcttctaccatctggtgtattaccagttttcttaccataaacaacatttgaagttattgtaagtatagattgagttggataagaatttctataagttttattttttcttattttattcataaagctttcaactaactctacagctatactatcaactctatcatcattgtttccgtattttggataatctccttctatttcaaaatcaacagctattccttgttcatttctaatagttttaaccttagcatgttttatagcagataatgagtctgcacaaactgataacccagccataccacaagccatagttctaaatatatctctatcatgtaatgccatttctaatgcttcataagaatatttatcatgcatataatgtattacatttaaagtatttacatataatgttgctaaccaatcagtgaatggttcaaatttactcataacttcatcataatctaagtactcagaagttataggttcaaatcttggtccaacttgaacaccagatttctcatctacaccaccatttatagcgtataataaagttttagctaagttaactctagctccaaagaactgcatttgtttaccaattctcattgcagatacacaacaagctataccatagtcatctccccagtatgctctcattaaatcatcattttcatactgtactgaacttgtatctatagatactttagaacagaaatctttgaatccttgaggtaatttagttgaccatagaactgttaagtttggctctggagaaggtcctaatgtatatagagtatttaacattctaaatgagtttttagtaactaatgttctaccatctattcccatacctcctatacactcagttacccaagttgggtctccagagaataggttattgtaatcaggagttcttaggaacttaaccattcttaatttcataacaaaatggtccatatactcttgtaattcttcttctgttacgattccagcttttaaatctctttcaaagtatatatctaagaaagtagatgttctacctaaagacattgcagcaccattttggtctttaacagcacctaaataaccaaagtataaccattgtacagcttcttttgagttagttgctggttttgatatatcaaatccataagattcagccatttttttaagttcatttaaagctgatatttgctcagttatttcttctcttaatctgataacttcctcatccatgcaagaaacttctaatgatttcttttgctcatttttatcttctattaaagcatcaacaccgtatagagcaactcttctgtagtcaccaattattctacctctaccataagcatctggaagacctgttattataccagattttctagcagctctcatttctggagtataaacatcaaaaactccttggttgtgtgtttttctgtatttagtaaatatatcttttatttctgggtctaattcatatccaaaagcttcgcatgaattttcaaccatctttataccaccatatggcatgacagctctttttaaaggggcatccgtttgtaacccaactattgtttctaattctttatctaaatatcctggagcatatgcagctattccagaaacagtttttgtatcaacatctaaagtaccaccattttctctttcttttttaaataggaccattgcttcgtcccataattttttagtattttcagtggcaccagctaagaaagagtcatttccctcatatggagaatagtttaattgtataaactctctaacatttatttctttagtccatcttcctgttttaaatccttgccatgcattcattaagtatttcctccttagatttaaatgataaataatactattaaaattattttttatatacttaatttattttatatatttttttaaaaatatattttctaatataataatatcatattattcgtatcctgtatacataaaaaataaaaaattgtcgctttaaagtataaaacagattatatgttaataatgtggtgaaattatacccatatataaataaaataaaacaaataaatagctaattaaggagaaaatattttttattttttgtttaggataaataaattttattatggaaaaaagaaaaagcatacatcttcacaaattgaatatttatttaatagggggaggtgatagattgtttatcacagtggtattatttttagtaggtttcctattaattactaaaggcgcagatatctttataaattgcactgtagagataggtagaaaaacgaatatatcagaaattatacttggagctactatagttagttttgcaacaacattacctgaatttacagtgtctctacttgcttctattgatggtcatactactatgagtttaggaaatgcagttggttctataatatgtaatacaggattagcattagggttggttgtttttataagtccatttaatgtagataaaaaaatgtttttttctaagtctttactattaatagtatccgttatagttttaattttattgagtttagatggagttataacaagaggtgattcattattacttataataatattaatcttttatatggttaataattatagaagtgtcgttggaaaatctgatactaaaaatagaaatattaaaaataacactattaaagacatatctactaaaaaagggaaaaattatagaggtttttccgtattagaaattgtaaaaatactattactttttgctacaggattgataatgatgataataggttcacaaatccttatagagagtggagtaataatagctagttttttaaatatacctcagggtatagtaagtttaactataatagcacttggaacttctctgccagagatagtttcgtcgattactgctataagaaaaaatcatcatgaaatatcagtaggaaatattttgggtgcaaacatattgaatatagtatcagtaatagctgtatcagcaataccaaataacataccaatactatctcaaaatagacaattggatataccattcatgatattattattattaatagtaataataccaacacttaaatctaatagacttagtagaatacaaggtatattgatgttattcacatattttctgtacatatcaattttgtatttcatgtatattatttaactatactgtttaaaatattaattgcagaatatcctaaaaaagtatataatggataggttaagattaattgataacggagaggaataatatatgaatataacaaagtttgaagatttaccaataagtgagggaataaaaaaagctatagctgaaatggggtttgaagaaccatctcctatacaagcacagtctatacctgcgattttgtcaggtaaagacgttataggacaagctcaaactggtacgggaaaaacagctgcttttagtatccctatactagaaacaatagacccaaataatagaagtttacaagctgtagtgctttgtccaacaagagaactggcaatacaagtatcaacagaaataagaaagttagctaagtattcgcacggaataaagacattacctatatatggtggccagccaatagatagacaaataaaatctctaaagagtggtgtgcaagttgtaataggtacaccaggacgtacaatagaccatatcaatcgtaaaacattaaagatggataatgtaaaaatgattatattagatgaagcagatgaaatgctagatatgggatttagagaagatatagaaatgattttaagtaagattccagaagaaagacaaacaactttcttttcagctactatgccaagaggaattttggaattaactaagagatatcaaaaagacccagagcatataaaagttgttagaaaagaacttacagtttcaaatacaaagcaatactatatagaaactaggtcatcaaataaattagaagtattatgtagattagtagatgtatatgaccctaaactatctgttgttttctgtaatactaagagaaaagcagatgaattggtaggagatttacaagcaagaggatattttgcagatgcattacatggtgacttaaaacagactcaaagagatatagtaatggataagtttagaaatggtacaatagatatacttgttgctactgatgttgcagctagaggtatagatgttgatgatgttgaatgtgtattcaactatgacttaccacaagatgaagagtattacgttcatagaattggtagaactggtcgtgctggtagagaaggtatgtcatttacttttgtatttggaaaagaaatgagaaagatgaaagatatagaaagatatactaaatctaaactaataaagcataatataccaacaataactgatgttgaagagaaaaaagtaggtactttctttgcacaagttaaacaaactatagaagaaggtcacttaactaaacaattacaatggttagaaggtttctgtaatgatgaagattatgcaatggttgatatagctgctgcacttgtaaaactatctctaggtgaagaaatgaaagaagaaataatagaagaaaaacctagaagagagcgtggagatagaaaaggtggtactggagctaaagatggtatgattagattatttatcaatattggtagaaatcaaagagtacaagcaaaagatatagttggtgctatagctggagaagttggaataccaggtaaagtagtaggtactatagatatatatgataagtatacttttgttgaaatacctaaaaaagatgcaaaaacagtaattgaaaagatgaaagatattaagataaaaggtaataagattaatatagaaaaagcaaataagaagaaaaaataacgtatagtatacaaaactataattagaaaatatataaaataatatattggatatttaaaaagcctgatgtgttttcaaaacagatagtagataatctgtaagagttaacagcataaggcttttcttgttttatatgatattatgattttccagatcgttgtgaaaaatgtatattagttcctttttttcaaatctgatttgaaaaagagaatattaattatctatatagtttagattataataaaaaatgtaagataacaaaggggagaaaaagatgtcaatgacttatatggaccctagggtttttttgattttagaaatggtgttagaagaagacacaaatactctagaacaattttcaaatgttttgggtgttagtactaggactatcagaaactatataaaccagattaatcgagaattaaaaggtggtattgctaaaatagttaaaaatgaaaaaggtacatatagtataagaattgaggatgaaagtaaattaattgagattgtaaattttaatagaggaaagctatcaaattttataaatttaaattcacctgatgaaagaataaattatgttcttgatattttaactatgaccaacaatccaattaccatagatgatttggctgaagagatatgtataggaagaacaacattaataaaggatttaaaaaaagcagacagaattttagctgaatatgatttagaattaaaaaggaagccaaatataggtatgattttagttggtgaagaaatggatataagattattaatccttgatagattgtatgaaaattatattgatgtcttggaaaacgttaatcagataaatttagttaaagattatgatattgaatgtcttagagatgaattaaaaaagttgtttaaaaaagaagaactctacataacagaacaggtcttgagagatgttgaaagatatataatcatgtctgtcttaagaaatctaaatgggtacaaatttgaaaagatagataagagatttgaagtgataagatgttcagatgaatatactttaggattaaagctcaaagctttattggaaaagatatttaatatagttttaaatgaaaaagaaaccatatttttgacaatgccattaataggtagaaaagctcctagtacaaaattagcacttagcagtataaagataaatgatagcgtaaaggaagttgtagatgaagtaactagttttttattagagacctcagggattgattttaaagaagataaaaagcttatagaaaatttggaatatcacttgtattttgcacttaatagaatgagattcaacataagggtaaaaaatcctcttttacaagaaataaaggaaagatatacatttccatatagtgttgcaaagatagctgcaatgataattgaggaaaagtttgacttgaaaatatgtgaccacgaaataggatatatagcattacattttggaagttattttgaaaaaaattcaagaaaagttctaaatgtaaatagggtagctgttgtttgtggaacaggtcttgggactgcacaacttattagaataaagataggaaaaatacttggagaaagtgtagaagtaaatactttttctgatatagaagctaaagctaatttagatttattaaagtattatgatttagtatttacaacagtagatttcaaaacagacttagatgttccaatttttagagtaaatgcgttatttaatgaagaaagtataaagaaagagatagaaaatgcaatacttttgaaaaatagtataaatcttaagtctataaaaaagattgaaaaaaatatcccttttataggtaaattaattgaagaggataagttctttatattgaataagagtacgtttatggaaaatttagaagatatgttagaaaaattagttcataaaggaattattgatatagagttcaaaaaaaaggtattaaaaagagaaaagaaatcttcaacagcattagataattatatagcattgcctcactcagttaatactaatggggaaaatctttatctgtcatttggaatattagaaaaaccagtggtttgggatacaaaggaaattagaataataatattgatgataattccagataagaatgtagatagtacagacctgataataaaaagttatgaagaagtacttgaagtagggagagataaaaaaatgatagaagaacttgctaaagtaaaatcatttgatgaattttataaaataattaccaagaggaggtaataatatggacccagtaatttttattatagcatcacttattacagtgtatttattaaatatttttcttggatacttacagcttaaagattttaataaaaattatattgaactaaaaagaaaaggaagagtggcaataggcagaaaaaaaggaagaatttcatcaggtacaattgtgttgatacttataaatgatgatggtgtgattgtcgaaactagaaaaatgcaaggtgttacagtattggcaagagtaaagtcatttgaaggtttggtaggaaagagcttagagtacatagaaaaatcagatttaactgtttacaataaactacttaaaaaagcaatactagatgcagtcaaacagtacataacatttgagaaaaataaatgtgaagatacaaataatctgagtactgatgaagagtgtaggatggaagtagtttaaaaaaatatatttataaggaggagttaatatgacgcaattttttcaagtattagcaagtggtgcagatagttttatgaatttatttagggcaggtgggcaacaatttgtaggttttgtaacagatatagtaccacttttagtagcattattagttacaatgaatgcaattatcaactttattggtacagatagagtcgagagacttgcaaaaaaatgttctgcaaatatatttactagatatttgatattaccagtccttggtacatttgtatttgcaaacccaatgacactatcactaggaagattcttgccagaaaagtttaaacctagttactttgcagcagcaagcttttcatgccatacaatgaatggattattcccacatatcaatccaggtgaactatttatatatctaggaattgcaaatggtataacaactttgggattctcaacagcagatttagcagttagatatttgttagtgggtatagttgcaaactttattaaaggtgtagttactgactatacaacaaaatttgtagagaaacaacaaggaatagcattaaattcagatataaagattggataattactttaaggtataaataaatttttcaaataaaaagatagtgtatagaggaggataaattatatggcatttaacaaagttaaaatagtaaaaggttctggaggatggggtggaccattgataatagaaccaacagaaaagaagaataaggtagtatatgtgactgggggagcaaagccagaaactgcagtaaaaatagctgaacttacaggatgtgagttaatagatggattttcacagggtgttaaagatgatgaaatcgcatgtgtaataataaattgtggtggaacattgagatgtggtatatatcctcaaaagaaaataccgactataaatataatgaaaacaggaaaaagtggaccattagcaatgtttataaaagaagatatatatgtttcaggggtaaaaccaacaaatgtagagcagttataattgaggtagtaggagggaagaaatatggcttatgatactaaaaagaagataagtgagcagagtcaaggaattgttgcaaaaataggtatagcactaggaaatgtgacaagtactctttttcaagctggtagggatactatagatacattaatacatactatactgccttttatggctttcgttgcagtcctaataggtataataaatcaatcaggtataggaaattgggtagccaatttacttactccattaatcggaaatgttggaggtttagttgtcttatcaataatatgttcatttccgttgttgtctccgtttcttggaccaggagctgttatagctcagatagtgggggtattggttggtacagaaataggaaaaggaaatattccaccaagtttagcattaccagcattgtttgcaataaactcacaagcagcttgtgactttataccagtaggtcttggtcttgcagaagctgaacctgatacagttcaagtaggagttccgtcagttttatattctagatttttaacaggtgcaccaactgttctattagcatggttagcaagctttgggttatataaatagaagaatactttataaataattagagagaggttcagttgatatggaattaatatacagtactcaaataaataaaataggagataatgcaaatgaatttttacaacataatatgtttgtaactttcaaagataatgctcctcaagagttagaaaattactgttatatacattctgaaaataatttagtaaaagaaatacttacgaatgatgtgttatcaataaataatgttgattacaaaattacttctgttggtgagttagtaaaccaaaatctttcagaattaggtcatataacatttaagtttacaggtgaaaaagatggagcaattggagggaccttatatcttgaagaaaaagaaatagcacctattggcgtaggtactatactaaaaataattagaaaataaaatttaaaacgaatctaatcatattataagtaaattatagataaaagtcaatttaactaatcaagttaacttttaatgtgataaaaaaggggaaatgaaaatgagaaaagtggctttagttgttggaggaggaagaagtttaggtgaatatttatctaaacatttagctaaagtaggttatgatgttgctattgcagatttaaatgaagacaacgcaaaaaaagtagctgaagaaatagaaactgaatttggttgtaaatctgtaggatatggttgtaatgccatagatgaaagacaggttataagcactgttaaagctattgaaaatgattttgatagaatagatttattagtgtacaatgcaggagtggctgtaagtaaaaaaataactgattttggatacaaagattttaaatttattgtagacgtaaatttaaatgggtactttctatttgcaagagaagtatctaaagtcatgatagcaaaaggtattgagggtagaatcatacagataaattcaaaatcaggtagagtgggaagcaagcataattcaggatattcagcaggtaaatttgctggagtaggacttactcaaagtttagcgctagatttggcagaacataagataactgtaaatgcactgatgctcggtaatttacttgattctgatatgtttgaaagtttaattcctcaatatgcagtaaaattgggaatacctgaatcagaagtcaagcaagtttatatagataaagtacctttaaaaagagggtgtagatttatagatgttgcaaatatgcttacattttatgcttcaaaggaagctgaatactgtactggtcaatctataaatattactggtggacaagttatgtaaggtttttatggagtgtctcaagatgaactctttagttcatgaggcactttttttgtataaaattaaatatattttcatcatttaaacaatgaaaaagaggtttatctttattttgagatagcctcatttttgtaattaagaaacatagtgtttaagtaaacatataagattgttagttttttaaaagagaattttttaataatattatatttatgaagtatttttaaacttaatttgattaaaaaatagctacgcacacttgtgactttagtcatgagttagtagctaaattagtcagcatatagggaaacttatatgtagagataggatagaacctatccaatactacttgaattgctaaaaacccctaaagctaaccaaactaaaacataagggtgaaataaacctaagtgtgaaagttacgaaagtagaaaaaattggttagatggtataaggttaaatcctaagtactttaaaatgggcaatcagcaggtaaactccgaataggagaaacttcaacgactattcctcttgagggaagtacactacaagttatcggtagtggaagtgggtagaccttaacggataatgccgaaggataagatatagtctgtgcttgcatgaaagtgtaagaagttcataagagaactgcataggtagtagcgaacttatgtgaacgacaacctcaaaaatgataaaagttaagacttacggttcttatatatgttatttaaaaataaatataaaaaaccttcaaaatacttgttttaagtaattgcatattttaatattatgataggtgatgaaaaatggaagttactcatggtagaggatatgcatataatatgtcaaatatagacatccagtattatggggagacatctttggaatcctagttatttcgttgctactgtatcatgctactgtatcagaaaatacagaggagcagataagaaaatatattaataatcagaaaaaacaagtaaagtgaggtgatagtagtggaaaaagcttataagtttagaatgtatccaaataaaaaacagcaagagttaattaacaaaacttttggatgttgtagatttgtatataataagtatcttgctaaaagaatagaagtttataaaaatgctaaagaaacttttacttataaacagtgtagttctgatttgaccaatttaaaaaaagaattaaattggcttaaagaacctgacaaattttcactacaaaacgccttaaaagatttagataatgcatataaaaaattctttaaagaaaaagcaggatttcctaaatttaaatcaaagaaaattaatagattttcatataaaactaacttcacaaatggaaacattatgtattgtggtcaacatataaaactacctaaacttgatatggttaagataagggataaacaagtacctaaagggagaatacttaatgctactatatctaaagaaccaagtggtagatattatgtatcattatgttgtactgatgtagatattgaagcatttgaaaatactaataatcagataggtttagatttaggaattaaagaattttgtatctcaagttgtggagaatttatagaaaatcctaagtatcttaagaagtcattaaacaaacttgctaaattacaaagagaattatcgagaaaaacaatcggtagtttaaatagaaataaagcaagattaaaagttgcaagacttcaagaacatatagctaatcaaagaaatgattttctacaaaaactatctactaaactaataaaagataacgatattatttgcatagaagatttacaagtaaagaatatgattagaaatcgtaaactatctcgcttaatttctgatgtgtcatggtcagaatttattcgtcaattagaatacaaggctaattggtatggtagacaaattgtaaaggtaggtaaattctttgcaagttcacaaatatgcaataaatgtgggtataaaaacgaggaagttaaggatttaaatataagagaatggatttgtcctagttgtaatgaaactcacgatagagatataaatgcaagtataaatatattaaaagaaggattaagattaataacaattcaaaataaataacttatgtaagaaccgtaggaactacggggatagcctgtggagaattagtaagacatattttagtatgcaaaattctgtgaagcaggaacactgtgactttagtcatgggaggttcagaaaatatagctatgttttatatactgtagttttgaacatagaaagtttaataaattatagtatatattaatttttaataaggtaagaaagtagaaagaaggatattttatggatataataaaaaaattaagtcatggatgtacattagattgtcatgattgttgtaaattcaatgtttatactaaagaaaataatgtagtaaaaattgaaggagataaaaatcatccttatacaaaaggttttatatgcaaaaaagggatggctcatttagatagattaaatcataaagatagaataaagactcctatgcttaaagttgatggagtatggaaagagatttcttttgataaggctatagaaataatggcagaaaagcttacatactataaagaaaagtatacatcaaagtctgtcatgcattatgaccaatatggaagtgggtctgtgctaaaatacataggagatatattttttaatttttatggaggtgttagcagacataagggtggtccctgttggagtgcagggatgcatgctcaaaaatatgattttggagtagctaagagtcatgctatagaagatatgttaaatagtaaaagtatatttgtgtggggaaaaaatccagcatatactacaattcatactatgcaaataattaaaaaagctaaagaaaaagggataaagatagtagtgattgaccccatatatacaaaaacagctcaaatagcagataagtatgtacaggtaaatcctggaacagatggagctttagctatagctatggcaaaaattatagtagaagataaattatatgatgaagaatatataaactcgtatgttattggttttgaagaatataaaaaatatttatcttcattggaattaagttttttaattgatgaatgtggtgttaaagagaatgatataagagagttagtggatttatatactaacaaatattcaagtataaatgttggatatgggcttcaaaaatataaaaatggtggaaacacaataagagcgatagatgctttaggtgctataactggtcaaataggatttagtggtggaggggtaaactatgctaataaagtttatccaagtgttataaattctgacccttacaatagccaatcatatggtgaagatagggagttttatgtaagtaatatcagtaaatttatagaagaatctttaaaaaatacatcaaataaagtaaattatgcatcagatgaacttgatacaacatcaaataaagtaaattacatatcagatgaacttgatacaacatcaaataaagtaaattatgtatcagatgaacttgatacaacatcaaataaagtaaactatgtatcagatgaacttggtatggcattacataaagtaaattgtgtatcagatgaacttgatatgacatcaaataaagtaaattatgtattagatgaacttgatataacatcaaataaaacagattatatatcaaatgaattgtataatttatctaataagtcaatcaaagataatattcctataaagatggctgtgataactaaaagtaatatgctgaatcaactgccagatttagtagaattggagagggtgttttcaaaaattaaatttaaagtatgttttgatatgtttatgactgatacagctactttatgtgacatgtttataccgtgtacaaatacactagagagtgaagatataatttatagctcaatgaccaatccatatataacctataatgaaagagctgtaaagccagcacataaattgatggatgaatattatttctttatggagctagctaaaaaaatgggattaaatgattatccttttgtagaaaagagaacttatttagaaaaagtgattgaaccacttaagcgttttgacaaaaatctggatatagaaaaacttaaaaacaattactttactatacataaccttgttgcttgggaagataagaagtttgagactccatctggaaaatacgagctttattcagaaagtataaaaaacttgggaataagtccaacacctgtatatataagcaataaatataaagaaatagaagataaaaatatttcttttagattattaactaatcatcatgcagatactttatttagtcagcattttatggacaaaaaatctatagctcaagcatatataaatcagagaatggctaaaaaagtaggtattgaggacaaagatattgtgatattgaggtcaaaaaaggcaaaaataaatgtacaaataaatatagatgatggagtaggtaattatatagtaaaaatgtatgttggttggtggaagaaacatggaaatcctaatagtttaacagacactggtatatcagattttggaggtcaggtaacatataatgaaagtatggtagaaataatacgacaaaactagttaaatttcattgaaggaataaaaatataattatagaattgattaaaagttactatttttacaaaactattgaaggagggatttttgatggtaaattattccttagaacataagaatctatacatagaatttatgtgctcagaactagaccaccatgtagccaatgaaataagggaagaaatagataacttattaagtgtaaatcaagtaaaaaatgttgtatttaattttgaaaatattaattttatggattcttcaggtataggcgtcatcataggtagatataaaaagatttctaatgaagggggacgagtttcagtaattaatataagttcacgagttaagaagatttttgatttatctgggttaaataaaattattggcatttatgatacgtatgaagaagctctaagttctttgtagggaggagtatgtgatgaataatattatggaagttaaattttcggcaatatctgaaaatgaaagtttagcaagagttatagtagcatcctttgcagctaagttagacccaacagtagatgagttagtagatataaaaactgctgtctctgaggctgttacgaatgctataatacatggatatgaagaagacagttctaagtttgttttcttaagatgtgagatagaaggaaatactataaagattatagttgaagatgaagggtatggaatagaaaatgtggagaaggcaatggaaccactttatacatcaaaaccagaacttgatagatcaggaatgggattcacagtaatgaaaagctttatggacgatgtagaggtaagttctgtaaaagataatgggactagaattgaaatgactaaaaaaataaatgtgcctaaataaagtccaaaagtgaggttttattatggaagtaactgttgccagagaagaaaaaaaacctcttcttagtcatgaagagactctagaacttattgaaaaagttcaaaatggagatgaagaggcaaaagaaatattaatatcaagcaatttaggtctagttaggagcgttgtatctagatttttaaatataggatatgatagagaagatttatttcagttaggttctataggcttaataaaatcaatatataaatttgacccaaaatttaatgtaaaattctctacttatgcagtaccaatgattttaggtgaaataaagagatacttaagagatgatggtatgataaaagtatcaaggtcgttaaagcaaatagctgtaaaggcaaagatggaaagtgaagctttaactaaaaaattaggtagagagccaagtatagaagaattagctaaagcaatagatgtagaaaaagaagatttagtaatggctatggaagctaatttcaatgttgagtatttgcaaggagttattcatgaagaggaaggttctccaatatgccttattgataaaataagcatgaaaggagaaagtgaagaagaaaaagtagtggataacatattgttaaaagacatacttggaagactggataagagagagcgtcaaataatagttctcagatactttgaagacatgactcaaagtgaaataggagagatgctcaatatatcacaagttcaagtatctaggatagagaagaaagtattgtctaagttaaaagaatatatatcgtgataatacttatgatatgtagaataacaaaatataataaatatattactaaaataaaatgtaataactttttatgttaagtttttaaattattaaaagatactaaaataataaaaagcattaaaaaagtaaaaatataaaaacaaggtgtctttatggaaaaatagattttttctttattaggcatcttttttattttttgaccaaactttagatagtcaaaataaataataggtttatttttttaaaattaacaaataatactttagagaggtgtttagtatggataaaaattataaaaaatatgtagaccaaataagcccaaaacctacatatttaaaaaactatacacttgcatttattgtaggtggaattatttgtatgatagggcaagcaataaatgatttgtatatgaaagttggaggtcttgataaactaggtgctagttctgcaacatcaataacattaatatttataggggcatttttaactggattaggagtttacgacctaataggaaaaagagctggagctggttctataattccaataacaggttttgctaactcaatagtatctccagcaatggagtataaaagagaaggctatgtattaggtgtaggtgcaaacttatttaaaattgcaggaccagttttagtttatggtataggttcttctattttatgtggaattatttattatatttttaagatgttttagatgatttttatttaatttaaattttattaattatgaagaaggtataaaatctgaaaatagctactaaagtaactaattgaaaaataattgtgcagatttaattaatattaaaaatttgaatagtaaaatgcaaaattaaaaaggtgtgaaaatatgaaaaataaaagaattggaaaaagaacagtcaagttagaaaataaaccaaccataatatcaactggaactatagtgggtcctaaggaaggtgaaggaccactaaaggactattttgatatgattatgactgacgatttatatggtgaaaagacttgggaattagctgaaagtaaaatggtagagactgcatcccaacaagctatccaaaaggcaggtaaaaaattgtcagatgtaaattatatgctaggtggcgatttaataaatcaaatagtgccagcatcatttgcagcaagagaactggctattccatttttaggtatatatggagcttgttctacaatggcagaaggtctttgtataggttctatgcttatagatggtggttttgctgatttagtactgtcaggtacatcaagtcactattgtacagcagaaagacaatttagattcccacttgaacttggaaatcaaaaaccaatgacagctcagtggacagttacaggagcaggaagtgtattattagctcctaatggagacggtccaaaagtaaagtatgttactgttggtaaagtaatagatgagggtattgatgatggtaataatatgggaccagctatggctccagcagcaatagatactatctactcttactttgaagatactaatgatgacccaaatagctttgatataattgctactggagatttaggtactcttggaaaacagatagcagaagactttctaaaagaaaaaggtgtagatatatcaaaagtttatactgactgtggtatagagatgtttaaccttaaagaacaagatgtccactgtggtggaagtggatgtgggtgttcagctacagtgtttgcaggatatatatatgataagttgagaaaaaaagaatttaacaaagtaatgcttgtatcaacaggagcactactttcaccgacaagtacactacaaaagcagacaataccatgtgttgcacatgcagtagtaatagtaaatgagtaggaagtgatataatatgttaatggactatgtaagagtatttattgtaggtggaattatatgtttaatagcccaagtaatgatggattatttcaaaatgcaaactccatatgttatggtaacgtatgtaacaactggtgtagttttaacttttctaggactttatgagccattagttaagtttgcagcagcaggtgcaacagttcctataataggatttggatattcacttgctacaggagtaataaaatcaattcaaagtgatggttttttaggtatttttttaggaggtacaactgctacagctggtggaatagcagcagctatattctttggatatattatgtcagtagtatttactccaaaagcaaaaccataaatctttattaaaagaataataagtttttgaaataataactttttataaagcaggtggatatcttttagattccacctattttttatataaagaagcgtttacataattgaagttgacaattatttacaacatagtgtagtattatattatcaaaataaaatgaagtgaagtaggggataaagatggtaactattaaagatattgcaaggaatctaggtatcagttattcaactgtttctaggtgcttaaacaataatcctaatgtatctgaaaaaacaaaaaagaaagtagtagaagaggcaaatagactagggttccattttaatgtaaatgcaagaaatttagcaaaaaaagaaactaacaggataggggtaatcttttcaaataattttaatcatcaagatactagaaagttttttagtgatataatggatagttctataaattctattgagactaataaatacgattttataatacagcctaataataacattagtggtgatagtaatgtatataaaatggtaaatggacaaatggttgatggattagtaattgtgtctcaatcaataaaaaaagaagagtatgattttttaaaagacaataattttccacatgtatttatatattttaaaccatcttttgtaggagaagtagacaatttcttttgggacgataacgtgtatggaggttatatagctaccaagcatttaattgaccatggtcataaagacataataacagtaacttcagatgataggagttcaaaaatgcatgaagatagaactaagggatatttaaatgctatggaagaggcaaatttaaagaccgaagtcattaaatctaaaatggattttgaatctcaagttgaatttttagaaaaatatattgataaaataaaaaaagcttcagctatatttgtacaacaagatgtacctgcgatttctataatacaagagttaaaaactacttatggtataaatgtaccagaagatatttccataatagggtataataatattgaattaatatcatattttaggtcgcatttatcaacaatagatgacccaagagagcaagttataaaaaatggagtagatagtttagtaaatataataaataaaaagagtacagaacacattccaagaaaattatatccaaggttaataatacgaaatagcgttaaaagaataaagtagtaagcttttaagtatcaaaagtttattaaaaatattatagattatgtgaagttttttaacaaacaatataaataaaaattaaaaggagtaggtgtatataagtacattgtactcctttatttattgagatagtttttataatatgaatgaataattttattcaattatttgaaaatccgttattttaacaatataaattaataaattatttgtattttatatcatgaatctataatatttttttgattcataactaaaagtatataaaaatgatgaataaatatatattatacattatcaatgataggttatataataaaatcactaacaattatattataagaaaattataaaaattacaaggaggtatagaaatgaaagaaaaagcagggattagaaatgccataatagcagcctttataatcacaatattggcagaattaattggacctatttcatttaaagttatgggaataaatgtaactttacttagtatactatgggctatattcataggaatggctgtttctcctcatttattagggagagttataccagccttaaaaaagtttataggggataatgaaataaatgtatctccatatttattatctttgacactatatccattaggaataatgtttggaattaatgcagggcctaaagttggtatattacttcaagcaggaccagcacttttattacaagaatttggtcatatgggtacaatgttgatagcattacctgttggagtagcattaggtcttggaagaagtgcattaggtggtactttttcattatgtcgtgacacagcactaggcattattggagataagtatggattaaactcaccagaaggtataggaacactaggaacttacataagtggtagtatatttggaacattattattttcatttttagcaccagtgggtgtacttttaggatttcatccatatgctttagcaatggcatcaggaatgggtagtggttcaatgatgggagctgcaacagcatcattaatgaatacggttccacaaatgtcagagcagattttagcatattcagctactagtggattgattacagctgttactggaatatatatagaattattcttatctttaccagtagccaactactattatagcaaagtagctccagttattgaaagatttagaggaagaaaaacaagaagaacaagtaataaattgtaaaggaggatatatatatggaaaaaacttttaagactattatggagcagataaaaatagtattgtttatatatattattacttgctttggacaaatgatagcacttaagactcaggctcaagatttgttgattggaagtatatctggatttttgttggtgataattgctattataataaagaattttgttaaaaaacctaatttaccaggttttgcatgggctacattagttgcattcgttttatcgcttccaatatctccagtgggggatatcatagcaacaaatgtagggaaaatcaattttatgtctacagtaacaccattattagcttttgcaggaatctctgtaggtaaccaattagatatattaaagactttgagttggaagttagtagttatatcatttatagttatgacatctacttactttggttctgcttttatatctcaaacagttttaagattaaatggaatgctttaaggaggtagtaaatatgaatgaattaaaagcaaaaattaaagaggaaataaagttattatctgaagagaaaaagacatcatttgaaaaagtttctgactatttattttcaaatccagaattagcatttgaggagtataagtcacaaaaagcattatgtgatttgttagaagaaaatgaatttaatgtaactaaaggtgtaggaggattagaaacatcttttgaagctgtgtattcaaatggaactaatgggaaaacagttgcttttctagctgaatatgatgcacttccaggaatgggacatgcatgtgggcacaatatcatagggacaagttctgttggtgcaggtatcatattaaaagaaatcatgaaaaaacataatatagaagggactgtaaaggtttttggaacacctgcagaagaaagagtaggtggaaaaataactatgattaaagaaggtgtatttaataatgtagatgctgcattaatcttacatccaagtgatgcttcaatgcctgatgatatatcatttgctcaagttaatttaaaatttgattttactggtaaggcatcacatgctgctgcttttccttgggaagggaaaagtgccttaagtggagtaatagcactatttaacagtgtaaatagcatgagattacatcttaaagattatgcaagagtacatggaattataactgatggaggtagcatacataatataattcctgaaaaatctacagctatatttaatgtaagagccttaagcatagaatatttaaatgagatttgtgaaatgcttaaaaattgtgctaaaggagctgcaatttctactggaactaatgtagaaatagttcaattagatgaaatatacaaagagattaagaatgattctgaattagtgaatatagttagacaaaattttgaagttttgggtgaagactatgttgaaagagatttaagtcaaggtataggttcaactgatacaggaaatttaactcatgagatacctgcaatacaagcatatataaaattaaaagaaaatactgcaactcatacagatgaatttgctgttgcagctggtggtgaagaaggcaaagtagcacttataaaagcaattaaggtgctagcaatgtgtggagtagatattttgtatagtaaataatatataattttaaaatatattaagaaaggaaatcggattagacatgatattaaaacaagtaatagaggtttatgacattttagataaagcaaatgctaatggggaagaagtaaaaacttacttacaaggttatggtgaagtagatgtaactgtaaaagaattgtcttcaagtaaaggttcaacagatttagtaaagcttacaattcctgggaaaaatggaaaattaaaaggtggagatgctcctactcttggtattttaggtagattaggagggattggagcaagaccagaagttataggttttgtctcagatggtgatggagcattggtagcaattgcagtggctgctaaacttttggatatgcaacgaaaaggggacatattagatggtgatgttgtaatttcaactcatatttgcccagatgctccaactaaagaacactatcctactccttttatggattctccaattgatatgatgactatgaatgaaaatgaagttgatagtagttgtgatgcaatactttctatagatactactaaaggaaatagagtaatcaatactagaggatttgcaatatcgccaactgttaaagaaggctacatattaaaaactagtgataaccttttagatattatgcagactgtaacagggaaatctccatttgtattccctttgtctattcaagatataacaccatatggaaacaatctgtatcacttaaatagtattttacaaccagcagtagctacagatgcaccaatagtaggagtagcaattacaacagagatgcctgttgctggatgtgctacaggtgcaactaattttagtgatttagattcagctgggagatttgcaattgaagttgccaagctatttggtagaaataagtgtgatttctatgataaagaagagtgggaaatgcttattaagagatatggcaaattaaatagatttcaaacatttggtatacagtaattagaaaaatattaagtttatataatttgtgatacaactatttaagaagatataaacaattaggaataaaagtaagaataaagcacttagttaaaaactttaaaaaaaaatatttatttgtttatataaaaaggaggattctggttattgggattctcttttttatgaatacaaataatatattgtaattataaaaaaaggagcgtttcaaagtgatttttttaatcaccttgagacaactccttatattttttatttaaattctattttttattgactgtatagctattttcaccatcataaggtggcatgaccttgaacagcgtggttttgtaaagttgggcaccacaaaacaaaaaatcaacaagcccttgtgtggtctgctgacgtgtttactatactatactttcccaaaaaccgcaagcactatgggaggctataaggcggcgaccattcaggggcgatcccctcgaaaccgggatagggttcccatgtgggacataataaagagcgccccggaggtatcaactaccatccggggcgctctttattatgtcccgtgggaaccatgcccacgaagcagggcgtacaacggacagataggtcctaccctcctgacagactggaatctcaatcccatcgaaaacaatcataacaatcatggcaagattatatacactcctgtaaaatatttttgtgtgtaccatgaagtactgcttgccactattgagaacggataaaagggaagtacgtattataccaataaggtgaacgaaacaaaatactcatttgataaagttaaataaacctgtcggaaccccaccaatccggcaagagctcactcaatttaacagttttttctgtttcgacattaactaaaatctcaatacaagcactatccttatcaagttgcattaaatattcacgacaagcaccacatggtgagccaacactcccattgctcatcacacaaactaatttagtaattttactttcgccatttgttatcatattggcgatagcatttctttctgcacacattcccaatgtacaggctgtatcaatacacacgccagtataaacatttccgctgtcggtaaggattgctgcggcaaccccaccagcatcgataaaaggtgaaattgtgcgtggatttaattttcccctagcattattataaagttccttccatttcatcaggttgatcctcctgttgtatccatataaataatcttttatacgccttttccgcctaaggcacacaacacattactcgcttttttcattctaatattcgtgcgtgaaaatgtcaaacggtttacttcgtttcattacttcatactgctgttcataaccctgtttgttcacttgggcaccattcgagcaccaatttacccgtttcagggttgtagcgaacacagcagaaatgctcatttcatgggcttttctggctagaaaaaaaattttatcgctgccagatatttactattttttattaagttgctggagttccaccaccatcaggaggagtagtagagccaccaccattatttccaccattatcaggaggagtagtagagccaccaccattgtttccgccattatcaggaggagtagtagagccaccaccattgtttccgccattatcaggaggagtagtagagccaccaccattgtttccgccattatcaggaggagtagaaccgccaccattatcacctgtgttattattgttattattattttcttctggttggttattgtctggtttttttgtatcttcagatgatggttgagaacttactttagtaggagcagtaccttcaataaatgctgctttagagccagaagattgctttcctccatcctctaaattaatttttgtaaaatatacatttttaggaacttcaaattcagtaaccgttaaattagcatgtattttttccataattttttcccatagttttgcagtactagtacttccatgtggtacttctctacgttttatagtgttaccagaatcatcttttctaccagcatcatctccaatataagttgcaccaacataataaggagtgtaaccgacaaaccaagcatcatatgcactatttgtagtacctgttttacctgctacaggcattccctttggaagtgtagcaacaccaccagtaccttcagtaattacgctttctaacatatctgtaacaacataagctacttcagggtctacaactttatgttcttcaggagcatttttaactaataattgaccatcaaaggtagttatagtagtaaaaatagaaggttctacataaacaccttgatttgccaatgtaccataagcagcagccatttgaagtggagtaataccattcgccataccacctagtgtcaatgatgggaattttctatcacttgcttcagatgaacctgagtgattattctttaaagttgttataccaaagttctttaagtaatccatcattatatctacacattcatcataagagtctccaagcatttcagcagttttgacagctatcgtgtttgaagatttagcaagtgctttacgtaaactcatagaaccatgaccagcagtagtagttcttggattccatttattattttcttcaaacttatatcctcctcgagaatcacttagagcagttgattgtgttatttttagggtatcaatagcaggtgtatatattgctaaaggttttatagaagaacctggctgatgagggttagtagcacgattcaaagtttttctaccacttatatttcttcctccagctagtgctcttatttcaccatttttataatctaagattaccattgcagcttgtggttggctaactccatcagggccgaccatatgtcctgggaaattgctatttctatcaaattcttcttctaaagcatcttgcattttagggtctatagttgtgtttacaattagaccaccattgtagaataagttttgagcttcatcatttgtatgtccttgttccattaaagcatttataacttcactttcgataaggtcttctacagatgaagaaactttatctgatgattgaggcaattttatttctattttagctttgattgcttcatcatattcactttgttttatatatttcaattctaacattttctttaaaacaatttcttgtctttttttagcttcagggttacttacagcctttctaacaactaatgtacctgcttttaattgtctataagtatcattagatataagctcccaagattttattttttcaatcatatcaaagtccacttgagtagggtcatctaaatcatcatcagttgtgttaacaaaaaataataatttattttctaaatcctccttagtttcatttccctctaacttagaagttttataggctgaaaatcttgatggatttttagttgaaccagcaagaagtgctgactctgctagagtgaggtcagctgcagacttatcaaaataaccacgtgcaccagcctcagcacctgctagacctctaccaacgaagaagttatttaaataagtttctagtattttatctttacttactgttttactcatctcatgtgcatagtaaatatcctttattttacgaggtatagtttgctgttcagttgttaacagcattttggatacctgcataggaatagtactaccaccttgcttagtacctgtaagggtctttaatactgacctaaataaacctttaatatcgacacccttatgctcataaaaacgctcatcttctattgcaattacagcatgttgaagataaggggaaatcttatctaatggaacgggtgtctttttatttacacttggagctgtagacaatgtttttccattagcgtatttaatagtagttgtttggttcgtctgtttatctaaaacagcttctgtaactggagttacatctcttagtgacgcaaatactagaccagcagtacctgctgtaccaacaactagtaaaactaaaaatactatcccaaatactcttagttttttaaatttatcgctttttttagattttttcttgttttttgttgaacgagtcttgttagctgaagttctattaattggtttatttgtattaccagatgagctaactttttttctcctgattttatttccatttttatcattatcgttattcataagattttaacctccttacttaatgcaatattataacacaaataggagtagttttgtaattaatagaaaaaatgaatttgctataatattctgtacattgtatatgtataaacgtaatatattaaaaagtctatatttttattttatttatttttgacaaatattataaaaattatgccaaagctacatataaataaataggaggggataattttgaatagaatagtagatagaaaaacaaaaaatgaatttagaaaaatcatagctatttttttagtaattcttttcttgtctgtatttataggcagttttatatatatagataaaactttaagaccgacaataacagttttagcagagactaaagctcttgaactagcaaataggtcgataaataaagctgttgctgagatggtagaaggaaaaataaattatgaagatttaatggatatacaacttgataataatggtaaaataactatgatacaagcaaacactataatgatgaatgaaattgcatctgcaatagctttagaaatacaagatgaattaaaaaaggataagacagcaagttcttacatacctataggaacagcattaggaagtcctatattagctaaatacggtcctaaacttgaagtgtctattgaacctataggaacagtatcagtaaactttaaaacggaatttgagtcttcaggtataaatcaaactagacatagaatatatttagaagctcaaacacaagttaaagtagtaataccacttataacttcaacaaaacaaattaaagctcaaatacctatttgtgaaactataatagtaggtgatgttccagaaagttatgtaaatattccagaaaaaaatctaggaaatgttttacctaacactggaaagaataccaacaagtaatataaagttgtatatttttaaataaattcaaaataatagtttataaataaaatttttggaaataatattaatataattttaataaaaatttatattttatactatgtaaaatatctaatatatttggtctgtaggttaaataaaagtacctttagaccaaatatattattaataacttaataacatcttaaaacttatttatttatattatttacaacatccatttaataaatacaccataacctacagctgggtcattttcaattgcatgtgacactgctccgattattttattatcttgaactattggagtaccactcataccttgtacaataccaccagtttgagctaaaagctttttatctgtaattttaattttaaaacttttactttctggatgtttttggttttctatatctataatttcaatattatattttttacacttattaaagttatcttgtaaaattatttgagcttttcctaatttaacttcatctaaagatgctactttatatttttttaaattggaaatatcaaagttattaatttgacctcttattccaaaatcagtattttctgtaaagctaccaataatattttctcgttttgcatttatacatccaacactacctttataagatttttctatattaaggtgcttagttgtagaaattgaacctgttttaataggtatttttcttgcattaccaacacttattggatgacctacagctccaaactctgatgtatctggattgatatacgttaaagtagcaaatccagaaagtaaattgttaaaactaattttttctaatatgtgtttggtagttttcattgttataagttgtccacctctatttaataaaatagatacttgtttttcttctggtaaagcatttaaggtattggcaaagtcactatatccatcaacttcagaattatttacctttactatagcatcacccaatctaaatggagatgcttctccaggatttctaactatgatattttttaattctgcgtcaatttgaagtacgtttccaattggtattaaatattcaggttcatttttttgtaaattttgtgcataaattaaattatttgagaaaaaatataataaaaataaaaatgttaaaacaattgtaaattttgacttagctaagttggtttttttacttaaagtattatttttaaaatgaaaatttttaagttgcataaaacacctctttcttattaaattattttaataatagaattgaagttttcttgctgcttctatattatgttgtgcaagaattatgttttgatgcttggaaaactgactcaataacaccttagttttcataaaaataaataaaataaatagtgtatatgataaaataaatacatattcatataaataaaaataaacaataactgtctagcataagaaaggagcaaaaaatgaaaaaatatagattgttagttacttgtataattgccatgggaatcataattataggaacatcaaatccagttagcaatttttacaagactacaaatttgattagttcaggaaatatcacaaatgaaaaagcagataaagatgaaaattcaaacaaaaataataaagataaaaatgaagacaaatctaattctaaaagtaataaagataagtcatcagaggacaaatcgtcagataaaaaaaataaaattcaaaaaaataaaaaacttttaatttgtatagacccagggcatcaaggaaaaggagatagcaatttagaaccagtagctccaggttcttcctctaaaaaagcgagagtatcttcaggaacagagggtattgctacaaaaaaaccagaatatgttctaaacttagaagcatctcttgttttaaagagtatattagaatctaaaggttataatgtaataatgactagagagacacatgatgtaaatataagtaattcagagagagcaatacttgctaatgataaaaaagcagatatggttgtaagaatacatgcagatagtttaaataattcttcaaaaactggagcatctatattgattcctgaaaaagatggaaaatatacagctcctatatatgaagagagtaataaatgtgctgaatttatcaaacagaatatggaacaatcaggtatacaaatcaatggaatcgttcaaagaggtgatttgactggatttaactggtcaaaagtaccagccgtattagtagaaatgggatttatgagtaactataatgaagacaaaatgatgtcaaatccagactaccaaagaaaaatgatgcagtgtatagctgatggattggatgcgtattttaaataagatatgaatagagaaaaagttaggttggtattattttcctaatttttatctctattttttattgtacataatgcaaagaagaagtttattttaggttaaattgtcgtaaatataactaaaaatattgggaatacttgatttaagtttaaaaagaatatattatagtatagaatgtgtaaaatttttttgagaggtgttgaaatgctagtagtagaaaatgtgagtcatggatttggtgcgagaacaatattagaaaatgtatcctttagacttagaaaaggtgaacatattgcactagttggtgctaatggagaaggaaaatcgagttttttaaatataataacaaagaagcttatgccagatgctggaaatataaaatggtcttcaagagctacagtaggttacttagaccaacatacggtattaagcaaggaaaaaactataagagaagtgcttagagaggcttttaagcatatgtttgacttagagcaagaaatgattgctatgtatgacaaaatgggagaagctagtgatgatgaaatgagtaagcttcttgaagaaacagcagagatacaaactatacttgaaaatagtggtttttatatgatagatgcaaagatacaagaagttgcaaatggtcttggtcttggagaaattggtcttgataaagatgtaactgacttaagtggagggcaaagaacaaaagtacttcttactaaacttctacttgaaaatccaactattcttatattggatgagcctacaaactatttagacgaagagcatataacatggcttactaagtaccttcaagagtatgagaatagttttgtcttagtttctcatgatattgaatttataaataatacatgtaatgtaatatatcatatggaaaatggagagttaaatagatataaaggaaattatgatgaatttgtaagacttaatgatataaagaaacgtcaagaagaacaagcttatgataaacaagttgaagaaagaaaaagactagaggattttgtagctagaaataaagctagagtagcaactagaggaatggctaacagtagacaaaagcaacttgataagatggaaatattagaaagaccaaaagaaaaaataaaacctacttttgcttttaaagatgctagagcagctagtaaaataatttttgaaacagagaatttagttttagggtatgatgaagcattgacaaaaccacttaatttccatttagaaagaggaaaaaagattgccttaaaaggaatgaatggtattgggaaatctactctattaaaaactttacttggaataataaaaccatttgaaggaaatgttaaattaggtgactatttggaagttggatattttgaacaagagagttcaagggaaaatagtaatacacctatggatgaagtttggagtgaatttccagggcttacaaactttgaagttagacaggctcttgcaaaatgtggacttacaaatgaacatataacgagtcaaatgagagtattaagtggtggagaagctgctaaggttagactttgcaaagtaatgttaaaaaatataaatttcttagtattagatgagcctacaaatcatttagatgttgaggcaaaagatgaattgaagaaggctatcaaagagtttaagggaacagttcttttagtatgccatgagccagaattttattcagaaattgttgatgatgtatggaatatagaagattttaccactaaaatcgtgtagtgatttaacttattgctggggggatttcatgaaaaagtttctaaatgtacttttttcagtttgtattagtattgttataatagtaggtgttattaattttactgttggatttaaacaactttattattttgacattgattacttaaatatatcagagttatctggtttatctgaagatgatataaaattgaactacgattatctaattgattataacttaaataagaatgtgtctgagttcaagttaccaacattaaaatcttctccacaagggaagatacattttgaagaagtcaggaatatatttcaaaatataaataaattagctaaattattattggtagtttttttagtaggaattatattgagtgtaaaaaataaaaatataaaaatcttgaaaactacatcaataacacttataattatgccattattattaacagttccaattttattaaattttgaaaaatcatttattatttttcataaattattatttagaaatgattattggatatttaatccaaatttagacccagttataaatatattgccagaggaatttttttttcactcaggaatgatgattttaatattaattttgttagcaagtatcttactatttgtaatgtatagattatataaatctttcaaaataaaataagatagcaaaaacgaattatattaaaggttatacaataaaaatagctatgtaataatatttaaactaagagtagtcgataaatatttatgcatagctatttctaatagaaattactttttactagtgattttaactaaatcttgaaatttgcccataatgtaattgtaattatcttttttgtgaggtaacatgcaactactgcaatctttgatacctttatctgtatacttaaagtttccaccacagttttctcctaaagcatacaaaggacaatagcaaaatagacagttaaactcttctggtttattagttttatgacaagggaaaaattcgcaatctttgtgattaaaaaacttataattttcgcccatattttcctcctaattaaataaaatttaaattttttatactatataagattttggtgataatataattatactaaataattttatgaatagtcgataatatagtattattaatcatagtattaatggtataattagtcaacagaaaaataatgtaaaaattatgtaagtgtattttgtaattagaatatgttttataacaaaaaatgaggtgattaagtgaaagaaattcaagaaaaagcacttcttgtaggtctgaatttgactacaatagtgaaaaaaaatgatgatatagacactagtgaatctatggaagaattaaaagagctaacaaaagctgctggggcagaagttgtaggtagcttaattcaaaataaacattctgtagatgcagcttattatataggaaaaggtaaagtagaagaaataagagcctatagtgactctttagatgctactttagtaatttttaatgatgaattatctggtgctcaaatcagaaatatagagaatgttgttggaagaaaagtaatagatagaactactttaattttagatatatttgctcaaagagcacttagtaaagaaggtaaattacaagttgaattagcacaattaaaatatagattgccacgactttatggaatgggtggtgagatgagtagaacaggtgcagggattggtactagaggtcctggagaacaaaaactagaaatagataagagacatatacttaataaagcagcagacataaggcgtgaacttaaagaagtaaaaaagaatagggagacacagagagttaagcgtttaaagtcaaatataccgattgtagcacttgttgggtatacaaatgcaggaaaatctactcttttgaacgaattaataaagacacacaaggattatgaacaagaaaaagaagtttttgtaaaagatatgctttttgcaactttggatgtaactctaagaaaggctcttttgccgaataaaaaagaatttttagtagtagatactgttggatttgtaagtaaacttccccatgatttagtagaggcgtttaaagcaacattggaagaagtacagtatgcagatttaattttacatgtaattgatgcgacaaatactagttatgaattgcaaaaaagtacgactgaaggtgtattaaaagaacttggtgtaaatgataaaaaacatatacttgtatataataaagtggataagctagaattggatatatatcctaaaagtcaagaagatattgtgtatatttctgcaaaacaaggcataaatatggataagctattaaatatgatagaaattgctttaatggaaaatacttattcagtaagcttgatgttaccttatgagagaggtgatatatttagtagaataaaagataaatataatgtggagaattttgagtatggggaaaatggcataacgctagatgtaaacttcgatgaagaagattttaatatctatagagagtacatactagaaaaataggttgaatatggatataaattgggaaaatatagataatcttgaagattattttataacctatcttctttataaagaatctaaaacagtatctcaaattagtaaaattagaaatatttcaagtactgaagcaggtgagcaacttatacaagcaaaattaaaaataaaggaaatgcaaaaagatgattttgaggcatctaaggatattttagataaatttttagaactagataaaattaagagacttgattttatggatagcttagatgacgaaaaaatggtatactttaagagaaaggttttcaaaagaatccttgtggaaaaaaatgctgaagatttaattgttttaatttgggcgacaggtgagctaaaagatgatagattcttaaagttgcttcatcagctcacaaaccacagacactcagatattagaagaataacttattcagcaatcagaaagattgaatcaccaagtagtagagaagtactgcaaaaaggtctctacgataaaaatgcacaaactagacagtattgtgcaaaggctctttcaaaactaggggatgaaaacagtttaaagattttacagcagttgaaagacaagaataagaattttgaaaaagaatatgtgcttagagcttatgacgaagccattaagtcattggaaaatgcaaaaaatttgaaaaagtaattttttattaaagcaatttgtttacttaatgatgtatttctagagtttaacaaggtaataaataaattaatgggaggggtttcaaatgatagtaagacgttgtgcaggtggagtagtgttttatgctaataaagtacttattgtaaaaaatgataggggagaatggacacttccaaaaggaaagatacttggaggaggacttccatatgagagtgctgttcaaagagttaaagtagaaactggcatagatgctaaaatgatagatgtggctggcgatactatgtatgaatttttctcaagaagtagacaacaagaagtttgtaatgcaataatgtggtatgttatggaagcttgtaacactaattgtgtacttgctcctgaatttcaagaaggtggattttataaagtaaaggatgctttagatatgttatcacatcataaagagcaagctttagtagaagtatcttataaaaagtttaaggaattaaagaaattagtttcagagggcgatgatgttccagcaaattaattgtgaatttagaggattctgaggaagggatagccccttccttttttaattgaagcagttttaagcgtaaattatatagtctctttaaattatgatttatcaatttagagctttagtagtttatatttaaaatcagtaagatatatttaaaataaaaattaaaaagtatacaattttattatataattgtcttatgatattgattaaagaagtattaaaagtccatttatttttaaatagaataattttatagatatataatttgatgtgtatattagaaaatgattaaaataggaggaaatacaatgagcaattacaggacattacatgaatttggaacagatgaaataactattgaaaagtctgtttttattggatatgctaagcctataaagagtgaagaagaagcattagagtttataaatgaaataaagaaaaagcataaagatgcaactcacaatgtgtgggcttatactgtaggtaaaaatatgaatatacaaagatatagtgatgatggagaaccacaaggaacagctggaatacctacattagaggttataaaaaaagaagatttgagagatgtagtggttgttgttactaggtattttggaggaacaaaattaggtgcaggcggtctagttagagcttatacaaaaggtgctaaattgggacttgaagcaggtaagataatttataaggtaatgtatcaagaagttaaggttaagatagactatactcaacttggaaaagtgcaaaatgagttaatgaatttggggtattttataaaagatactgtatatgaggataatgttgagatagtagtgtattcaagattagaagatgtagagaaattatcagaaaaaatgattgatataacaaatggaacaggaaaaataattttaggagaggaattttatttgtctgaacaaaatggagaaattttaatataatctaaaaggttattagaatagttaatacctcaaatagccaattagtatttttaagtgaaaagccattaaattgatttaatctaaatcaatttaatggctttttatcggattttgcacagaatcctttttttacttcaaataaaccgactaaaagtaaaaatatcccaaatattttttttaatatatctgaagacagataattagctaatagtgaaccaaatacagctcctaaaaccccaaacacagctataggtataaccaatttaaaaattacatttttattttttatatgtatagcaagtgctataagtgtcatagggatagatgaaagtaaatttacgctttgtgctattttagtgtctatgccagcaagtaaaacgagtgcaggtataaggattgttcctccacccattcccattcctccaataattcctgcaaaaaatccaattagagcaaataacattaaaacaccatccttaatgctgcaattatcataattattccaaaagaaattctaagaaactttccagtaaccttatttagtaatttagctcctataataccaccaagaatacttccaactgcaactttaattgttaagttaacatcataagtacctttagatacatataaaacagaacttgctgtcgttaagaatattattatagaaagagcagttgcatgagatttatgttcttctaccttaacgatgtcatttaatattggaactaaaagagtacctcctccagaaccaaaaactccatttataaatcctgtaaaaactccaattatcgtattttttaagttaaaatcaaagtattttttctttaaatcatcagtttttttcataaaaatcaccttctgaaatagttttaccaaaataggcaaattatatttatataaaataagattaaatataatctttcatgtttgtttaattttgcataaaaaaaaacatattaaaacaacatattaatatatggtataatatattaaaacaaagtagcaaatttgagaggagataacaatgtcaaatataaaaatacaaatagacaaaactgtagaatggcttataaataaggttaatgaggcaaatgcaaaaggattaattgttggtgtatctggaggaattgattcggcagtagttgctaatttaattaaaaaggcatttccagaaaactctatgggagttataatgagcataaaaagtaatcctcaagatagagaagatgcacttaaggttatagagggatgtgatatagaataccttgatttagaccttatagaaccacaaagtgctatattagacatggtagtaggaaatttaaaagataaacatttatatagagcagaatatttaaagatgacagatgcgaacttaagagcaagagtaagaatgagtacaatttatacaattgctaacaatctaggatatttagttgttggtacagacaatgctgcagaaatacacacaggatattttactaaatttggtgatggtggagttgatattttacctattgcaaatttaactaaaggagaagtatatgaatgggcaaaagagcttggtgttcatgaagatttaataaacaaagctccttcagcaggtctttgggaaggtcaaacagatgaagatgaaatgggaactacttacaatatgatagatgctgtgttagaaggtagattggatgaagttcctaaaagagaccaagagataatagaaagacttcatagattaagtgaacacaagagaaaaacgcctgcacaacctcctaagttctaatttactatttataagatttgtgataaaatttacaagtgatgaaaattagaataattaattgtacgtattaaggagtggaaatatgggacgtataggtaatataattaatagaaaaggtaaacaagatgctcaaagagcaaagatatttactaaacatgctagagcaatagcagttgcagctaaagaaggtggagcagacccagagtacaatgcagcgttaaaaacagctatagaaaaagctaaggcagataatatgccaaatgataatatagatagagctatcgctaaaggtgctggagcaggcgctggagaagactatgaaactatagtttatgaaggatatggacctggtggagttgctgttatagtagaaactttaactgacaacaaaaacagaactgctggtaacgtaagatactattttgacaaaaacggaggaaacttaggaactagtggatgtgtgtcttttatgtttgataaaaaaggacaaatattagttggtttaggagatggagtttcagaagaagaattgatggatgttgcattagaagcaggagctgaagatttcataacagaagaagatggttatgaaataataactacaccagaagatttttctagtgttcgtgatgagttaaaagctaaaggatatgagtttatatctgctgatgtgaagatgatacctcaaactacgactgtattgactgaagaatctcatttaaaaatgatgaataaattagttgatatgcttgaagaagatgatgatgttcaagatatatatcataactgggaagtagaataaatagtataagcatattgaaatttataagcattgaatcaattttaacatgtgataaattttatagaataagaaattactaaaatagacatacgcacctctaacctatatttgcataataatatgtaagtataggtaaggggtgtttttatatttataggttaagaaatttaaagtaaattttgagctggacttgattgtctataaataattgatgggtatataacttgttgctgaataccatttatacgcccagttactgtatcaataatcatcctaagactacgttctgctgtctcttccatttttaaatctataactgtcaaaggaggaatacttcttgccattagtcgtgaaggtccattacttgctgcaaatatttgaatatcctctccaattacaattccagattcatgaaatgcattcatcataccaagagctacaacatcatgattacaaaaaattactttttttagtgaattttttgcaagcattttttgagcaatatcatatccactatctattttattagaacaataatatatagaatctgatagatgtattccatgttctttacatgtttttaaaaaagatttaccccttaaagtcatacatgtaaaggaagttgggttgaatacaacagcaatatcatttttaccattttgaatagcatgtaaagctgctatacgaccagtttcctcattatcaatagatacacttgaaaaaccaggtatttcacgatttacaacaactacaggaattttaggtttattttttactagatattctatatcatcagcattgatacctgttaaaacaattccatcataataattatttgcaaaaaagtattcatcatcacatagatgaccaactttgtaaggtcgtatgatgatatttatgtttaaatgttctaaagaaattatgtggtttattgcttgaagtatattggttgatgccaactcaaatccctcatcctgccaataaaaagctattttaatattattatgtttaataggagtagagcgtttatatccaagcttatcagctgaatttaatataagctcttgtgtatgtagcggaatcctgcgttcatttcctttaccacttaagacgtacgagacagttgctgaagaaagaccacagtcttttgcaatatctttgattgttgccatgataaaatcctccttaaatagttgcttaaatttgcttataccaataatcttaacatatattcaactaaagaacaatattctacaaggtgcatattttacaggattagaataaataaatttaaaaaaacttcttacttatgttgacataatttagtttataggattataatatgcttaaataagcttattattaactcaaattaagcaaagttaagcaggaacatgcaatgctagcttgcaatgtgactgtaaagggggaaaaggtatgagtaaggtaaatatatttgaagttggtcctagagatggatttcaaaacctgaaagagtttttagaaactgataaaaagcttaagattattgatggtcttattgcttcagggattaaacaacttgaaattagttcatttgtaagcccaaaagcaatacctcagatgaaagatgcaaaagaagtagcaacttattgtgtagaaaaatatcctgatgtgaaactttatgcattagttccaaatttatatggtgctaaagttgcatgggagtgtggtataagagatatatcctatgttatatctttgagtgaaactcataataaaaaaaatataaatcgtacccatgaagagtctattgatgagcttaaaaaaataatgaatacttatccagacatgaatatatgtattggaatggctactgtatttgggtgtccttttgaaggtttaccaaaaattgaagatgccataagatttgctaaacgcctttgggaaaacggtatcagggagataaatctagcagatacaatagggattgctgaccctaagcaagtaagagaaactattagtgcattagttgaagctttaccagagtgcagatggcaggtacatattcatgatactagaaatatgggaatggttaatactcttgtggctattgaatctggaattactactgttcagtctacacttggaggattaggaggatgcccatttgctcctggagcatctggcaatactgcaactgaagatttagtatatatgcttgaacgtatggggtatgatacaggagttgattttgttaaacttcttgaattatcaaagtatcagaagagttttgtaaatggagtatatagtggtcatcatgtaaatataaagtctgatagttgtaattgttagttctattgattaatcgattaaaaaaatatgttgattaaaaaaatatgctgattggtaaaatagatttattgataaaaaagataaattataaaatacattatctaataaaacaaataaaaaaattgagggggattagtatggatattatagctttacttttatttttaggagttattattattgcatttgtacgtaagaataatgcaggtattttggctctagctattggtgtcatagctgttagaatttttggaatggatgataaagaactttatggagctataagcaactcaatgtttactacacttgttggtataacactactctttgcaatagtgaactcaacaggagcattaaagcttgttgcagaaaaaattgtagctgcttctggtaaacgtgtttggcttatacctatagcagtttttatagcaggatttgttgttgctggtgttggacctggggcaattccagcacttgcaattatcccagcaatggctgttcctgtagccataacggttggttataatcctgtaatgcttgcacttataggtgaatgtggattaatggcaggtcgtatgactcctattactccagaaggtcaaattataacaaccgttgcagaaggggttggaattgaaaatgttatgcctactatcttagcctgtcaaactctttctacaattgtattttcaatagtattgtttataattttcaaaggatataaacttaaaaaacctataaatgttatagatagtaagcaaatagaaaaatttaatataaagcagataatttctctaataagcatagtagttatgattgcttttatcataatttttgatatgaatgttgggcttgcagcttttgcagtttcagctgtacttatttttttcaatattgctgatgaaggagaatgtatcaaatcaattccatggagcacgatagtaatggttcttggagtaggtgcaatgatgacaatcgtagatgcagcaggaggtattgacttgatgagtaatgcattatcatcactgatgaatagtaaaacagctactccaattatgagtatttcagcaggacttatgtctatggttagttctgctttagcagtagtttatccaactatgatgcctatgtgtgttgatatagctaaggcagttggaggagtagacccactagcacttattgctgcagtcggtgttggaggttctcttgctggtgtaagcccactttctactggtggggcattgattttagcagctatgggttcaagtaagaaagactttaataaggaagaacaaaataaggtttttgtacagcttttcattatgagtgcagttggcttattggttattgcagtagtatcaatattatcatttaatgcaataacacatttaatgaactaattataataactgaaaataattcattaaatttaatttttaatattaatcaatataatataatttggaggggaagttatgaaaaaaggagcattaagcaatataaaggtacttgaccttacaagagttcttgcaggtccatattgtacaatgatgttggcggattttggagctgatgttataaaaatagagatgccaagaaaaggtgatgatacaagaggttttggaccttttgtaaatggagagagtttatactatgcaaatataaatagaaataaaaaaggtatcactctaaaccttaaatcagaagaaggaaaaaatatatttttagaaatggtaaaacatgctgatgttgtagtagaaaattacagaccaggtgtaatggaaaagttaggtctgggttatgatgagttggctaaagttaacaatcaaataatttatggagctgtatcaggatttggatgttatggaccatattcagaacgtccaggttatgatattattgcacaggcaatgggtggtcttatgagtataacagggcaagaaggaggagaaccaacgagagttggtaatgctatgggtgatgtactaggtggaatgaatttaactattggtatactcacagcactcaacgctagaaaaataataggaaaaggacaaagagtagatgtttccctcgttgattctgttgtatcgtctctcgaaactggtatacagagatactttgattcaggacaacctgaacttatgggtaatagatatgcttcagcctatccttatgactcttttaaggcaagtgatggaagttttgtaataggctgtggtaatgacaaactttttgaaaagttatgtaaaaaagttctttttagagaagaccttttaatagatgagagatttaaaacaaatcttaagcgttgtgaacattacaaggctcttaaaccagaaatagaaaaatggtctgttaagcatacaataaaagaagcagttgacttaatatcagaggctggagttcctgctgctcctatctataatcttgattgtgttacaacagatgaacatatagcaaaagcaagagaaatgattgtagatattagtcatcctattataggaaatatgaaagtcaatggaaatccagttaagttgatgacaacaaaagctaaaattgatatgccagcaccatctctaggggaaagtaacgaggagatttataatggttggcttggttttgatagtgataaaataaaagatttaaaagaaaatggagttatttgattaaaaaatagctaaacacacttgtgactttagtcatgggaggttcagttagaataatatcaaaaaatattaaatcaatactgtaaatcaaatatagaattgtcagaagcatttaagatgggaaaagctacttagacattgagtctttgtggcttttcctattttcattaagaactttatattatcagaatagatatgtactaaactaaagtattaacaatttaaattaatagaaaataaactacctaattatgttgaataaagactactttagtgaaaataaacttatagagatgctatttaaattattttaatggaaatatcaaaaatgagactgcattctcaaaaatgagactgcgttttttaagtattttctcgaaaatgagacaaaaatattgttttatgagttttattgaagaaaaattcttctgtgaattacaatttaatcaattttaaagttgaaaattattaaaaatttagtgaaatttatgtatatttcgtttattttattaaaaataacaattttttactaaaaataaagaacttcaatggtgattggcatagtacttgctattttatattaacaagaaatgtagaaaaaataacaatgtataatggggggaatatgatggaatctgtaatggaaaatttgaacaatcttaaggtggaggttaaggacaaagtctgtgttattactataaatagacctaaagctttaaatgctcttaatagtgacactcttagggaactatcacaagttattgatgtagtatcagaaaatgaggcaatattaggagttattattactggagaaggtaaagtttttgtagccggtgctgatatacgccagatgcaaaactataaaagtgaggaaggcagaaaatatgcaggttatgctcagggaatttttgataaaattgaagctcttgagaaaacagtaatagcagcagttaatggatatgcattaggtggtggatgtgaacttgctatgagttgtgatattagaattgcatcagaaaaggctatatttggacaacctgaagttaatttaggagttattccatgttttggtggaactcaaagattatcaagacttgttggaactggaatagctaaagagttaatttttacggggagacaagtaaatgcagaagaagctaaatctattgggcttattaataaagtggttccaagtgatttacttttagaagagtctatgaagatgatgaaccaaatagttgaaaaagcgccaatagcaataagatatgcaaaagttgttattaacaaagggatagatatggatttaaagaatgctcttgaactagagaaagatattgcaggtttaacttttgctacaagagataagcaagaaggaatgaatgcatttatagaaaagagaaagccagtttttgaaaataagtagctattataactaaattggaacaatgtagaatatattcaaaatctaaatttcgtgaaaaaatacatatagtttaattttaaaaggagttaatttatgaatacgggagtaattataagtttagtagggattatcatagctctatctcttctagttgtaatggttatgaagggaataaatatttttattatagcaattgtatgttcatcattagttgctataacaggaagcctaaatgtgtatgatgcacttaaagtggattatatgacaggatttgttggatttcttcaggcaaatttctttattttcctaacagggacattaatgggaaaaataatggagattactggtggagcaaaatctattgctaagatgattgtaagatggattggtaaggataaagcactactttctattccaatagcttgtggaatattagcctatggtggagtaagtgttttcgttgtaagttttgcagtgtttccgatagctttagaaatttttaaagaagctgatttgccacgaagatttataccagcagctttgacttttggatgctcaacttttgctatggttgcaccaggggcaccacaaattcagaatattgttccagcatcaacattagggacagatattatggccggagcagtaaatggttttatatcatgtgcagtaatgtttatagttggaagtaccattttgtacaaaatggtttcaaaagaaaaagccaatggtggtcattttatagcacatgaatcagatatatttgatgaagcagaagcaactaattctaagagagaaaatggtcctaatggtgtaattgccttaattccattgatagtgtcaattttaataattaatgtaaaagttaatggaaaagcgatagtaccaattgaggtgggagtatttattggagctttattagtatatttattgttaaataaatatcaagataatactaaaatagttggacatgttggtgatgcatgtaaaactacagtagtagcaatatgtaatacttgtgctgtagttgcatttggttcagtagtaaaatcagcagttggttttgacttcatagttaatgccatgactaatattcctggtcctcctattgcaggggctgcagttggaactacagttattgcaggtatttgtgggtcagcttcaggtggactaggaattgcagctccacttcttggaccagtatttttagccaagggtgtttccgctgcagcattaactaggactatggcaatttcatcagcagcattagattcacttccacacaatggatatattgttactgtaacaaatggtctgtgtaaagaaacacataaggatgcctatatgccaatattctgggtaactgttttaactccgtttattggaaccatagtagcagtcctactgtttacaatgttcccgggattgccataagagaaaagataaaaggtataaattatattttgatattataaaatcaattttcaaaatatatacaataaatttcatgttttaatactataaatatgtatttaaaataacaaattgaccatataaggaggaattgaaagtgttaaataaaccattagagggagttaaggttattgacctaacgtattttgtagcaggtccagggacttctaaaatattagctgattggggtgctgacgttattaaggtagagccaagctttggagacccaggaagaaagacaggggcaacaatgacaatgccaatagatgattataataatcctttttacagcacatataattcaaataaaagaggtttgtctataaatcttaagagtgaaactggaattgaaattatggataagcttttaagtgaagcaaacgtatttgtttcaagttatagaacaggagcattaaaaagactaggtcttgattatgaatcattaagtaaaaagcatccacaccttatctggggtcagataaatggttttggcgattttggacctgctaaggataatgcaggatttgatacagttgccttttgggcaagaagtggggctatgcttgatatagcagaaaaagatacaagtccaataaatccacctatagcctttggagatgcaacaacttcttgtagtttatctggaggaatatgtgcagctttgtaccagcaagctaagactggaaaaggacaaaaagtaatggcatctttatttgggcaagcaatatggaatgcatcatctttattagcatctacacagtttagtgatgagtatccaaaaactagaaaaaatgctatttcaccagtaataaattcttatcgttgtaaggatggaaagtggatattcttaagtattttagagcatgaaagatattttgaggcactttgtagattatttggaagagaagacttaataaaagaagagaaatttgcatcttcagtagaaagtaagaaaaatgctacagaacttattaatattttggatggtgaatttgcaaagtttactcaaaatgagatggttgaaaaacttactgctgctgatatagctcatgaaaaaattcaacatgttaatgatgtagtgactgatgaacaggctattgctaataactatatatatgagcatacaagtaaaaatggaaataagacaatgcttgcatccactccagttaaatttggaaatattgaagttaacatgacttgtgatgctccacttataggagaacattcagatgagatattgagagaacttggatacagtgattctgatatagaagctctaattgaatctggaattgtaacaatgaataaagaagcatgtgaaatatgttaataaacatgtgaagtatgttaataaataggagggaattttatggattttagattaacagaagcacaattaatgcttcaaagagtagcaaaagaatttgcagagaatgaaatagcaccaatagctgctgaaacagataaaacaggtatttttccaagggagctttttagcaaaatggctaaaataggatttaatggcattggaacacctgtagagtatagtggttctggagggacagatatagaaaaggtaattgttgttactgagattgccaaaaaatgtgcagcatctgcagcaatattatcaatacacacaatatatgctcaagctattttgaaatttggtactgaggaacaaaagaaaaaataccttccaatgatggctgaaggtgggtgtgtaggtgctttcgccttaactgaacctaatgctggttcagatgctgcaagagctgcaacaactgcaattattgatgaagaaacggatgaatatgttttaaatggaactaagtgttttatttctggtggaggtcaagcagaatcattaataatatttgcactgacagacccatcaaagggaataaagggaatgtctgctatcattgtcgacaaaggtactccaggtttttcaataggaaaaattgaagaaaaaatgggtattcatggttcagaaactgcagagttaatatttgataactgtagagttccaaagtctaacttattaggaaaagaaggcaaaggatttaatatagctatgacttgtttagatggagcaagaattggaattggagctcaagctgtaggaattgctgaaggggctttagaagaaagtatcaaatattctaaagaaagagtccagtttggcaagccaatttcagcgttgcaaggtattcaatggtatatagcagatatggcgacaatggtggaatcagcaaaattattagtatattatgctgcagatttgaaagctagaggagaaaaacacactaaagaagctgctatggcaaaatacaatgcgtcaagtactgcaagagaggttacaaatctagcccttcaaatccatggtggatatggatatatgaaggattatccattagagagaatgtacagagatgccaaaataacagaaatttacgaaggtacttcagaaatacacaaagttgttatttcaagagcagtactaggataggaggaaaagaatgaatatagttgtttgcttaaagcaagttccagatactaatgaagttaaaataaataaagagacaggtactctaataagagatggtgtaccaagtataatcaatccagatgatagaaatgctttagaagaagctctaaaaatgaaagatgaactaggagcagtgattaaggttataagcatgggacctcctcaagctaaaagtgctttaaaagaagctttggcaatgggagctgatgaagcttatttaatctcagatagagcttttggtggttcagatacttgggctacatctacaattattgctgctgctatagaaaaggttggaaagtatgatgtaatattctgcggaagacaagctatagatggagatacagctcaggttggaccagaggttgcagaatttttagggataccacaagttacttatgcaaaagaagtaaaggttcaagatgacaaattactagtaactcgttatacagagacaggggattatttaatagaagcaaagatgccagttttattaactgctataaaagagttaaacaatccaagatatccaagtgtaaaaggaatcttagaagcttataataatggagatgcgaagattactgtattaacacttgcagatttagatgttgatacaactcaaattggattaaagggttcacctacaaatgtttataagtcttttgcaccagttaaagacaagcataatgaaataatagaaggtataaataaaaaagaaaaagctgagaaactaatagaaatactattcgatttgaaactagtataggagtgttaagatgatgagagcaaaagttaatcaaggtataaatttaaatgattataatggtgtttgggtaataggggagcaaagggaaggcaaaattaatcctgttacgatagaacttattggtgaaggaagaaagcttgctgaccaattaggaaaagagcttgaagttgtgatagctggatatgaagtagagaaagaagtgaaggaattacttcactatagtgttgataaagtatattacatcaatgaccctcttcttaaagatttcactactgatggatatgcaatttcaattgcaaatttaatcgaaagaaaaaagccagaggttgtattggttggtgctacttctataggaagagatatagcgcctagaattgcaggtaaggttggaacaggtctaactgctgactgtacaaaacttgaaatagattcaacagataataagttattacaaacaagaccagcatttggtggaaatttaatggccactattgtttgtccaaaaaatagaccacagatgtcaacagttcgtccaggagttatggcaaaagctgtaagaaacgaatcagagactggaattttagaagttgttactccagaacttactgaaaaaatgattagaactagattagtagaggtacttccacaagaaaagaaatctgtaaatctaactgatgctagaataatagtatcaggaggaagaggattaaaaagagcagaaggatttgagcttataaaagaattggctgataaattgggggcagagattggtgcttcaagagcagcagtagattcagggtggatagaacattctcatcaagtgggacaaacaggaactactgttagaccagaactatacattgcatgtggaatatctggagcaatacaacacttagcaggtatgagtgattctaaatatatagttgctataaataaagatgcaaaagcccctatttttagtatatgtgactatggaatagtaggagatttatatgaaattatacctgaaatgatagaatcattaaataggtaacttttagaaaacattgaatatgtagaatgataagtcttataatattgtattgtaagacttattatttttgctgaaggttatagtggggagatgaaacaatgaaagagcagtggtataaggatatatttgcaagaatattatctatgactgatgatggttttattgttgtaaatacaagtggagtaataatagatattaatgataaatattgtgactttttaggaaaagaaagaaaagatataataggacaaaatatacaaagtattataccaaatacaaaaatgctagatgttatgaaagataagtactgtgaagaaggagctatacatcattattcaggtggaaatacaaaagaaaaaagtgtaatagtaagtaggtcttatgtagaaaatgacaatggagaagtagttgcaggagtagctcaagttaaatttagattgcaatcatttgatgtagctaaaaaattaatgtcagaatatatggagctccaatattataaagagcagtttaaggataactgcggttttgacaagctcataggtgaaaatagagacttcatagaacttaagaaaacaggtgtgaaagcttctaaaacaaactttccagtacttttaacgggtgaaacaggcacaggtaaagaagtctttgctagagcaattcacaataatagcagtaggtcagataaacctatggttagtataaactgcgctgcaataccagaagaattattagagtcagagctatttggttatgacgaaggagcttttacaggagcaaaaaagggtggtaaaaaaggtaagtttttagttgcaaataatggtacaatctttttagacgagataggtgacatgcctttgaccatgcaagcaaaacttttaagggttcttcaggaaagtgagatagaaccagtgggaggtcttaaaactataaagatagatgtaagagtaatctctgccacaagaaagaatttaagtaaaatggttgaagagggattatttagagaagacctatactatagattaaatgtaataaacattcatatgatggaattgaaggacaggcaagatgatattttattgctagcaaattatatattaaacaaattaaatgttgaatacaaggaattgaaggttttaagtgataaggttaaaaattgttttattaactatacttggccgggaaatataagagaactacaaaatgtaataaaaagtgcctatgctgtaagtgatgatatggtcattatgatgtgtgaccttccatctaagatggataatatcagcagagtagctcaatgtaatgtggatagcaattgttcaattcatgaaatggttgagaattatgaaaaaagcttaattattgatgtgttaaggaagtataattggaaatgttctaaggcagcagaggttatgggaatacacaagagtcttttatataagaaaataaaaaagtatgaaattgaattaaataattaagataacttgaattaaggcaatgctaaaaaaagcgcccttattcaaagcgaactgtataaactgttttatgcagttaaaacgtgtaaaagtagatgtgaagtactaatgtcaatcattagtactttttattgtatttataattactatctatatttcagtatcttttgatatctaagattattatgtttaatttaggatataacaaaaccctcttagttattgacagttttttatattttaactgtctactaagaggggatagtttagtttaaatttagagtaaattttatctagcatttataaaaaatattttgaatagcttttttgttatttagtcataattttctacttctttatcaagttctttgccacaagaatcacacttatatatagcattgtatccataatcatattcatcaactattttcttttgtctaaatacaccaccacactcacataggaaaccaatttttataagtgtaacgataaattgtgattttataaattttatatcattacatttatcgttagtgtaaaatgtataaatataagagttatcgcactcatctcttaattcaaatctttcaatatatgtgttattttttaattcctcaaattcttctttagttaaatatgatttttgttgcaattcatgtaaacgcttaatttggtccattatttatatcctcccaataattttagtattttaagcttagataaggaatctaagttttattaaatttatcccaaggaattatttaaatcatatttagttttattaattacaacatatataaattacacgaaaataaaactaattgtaaaaataatatcctgtgaaaacctaaactactaaccccttactaacccgaaaactaaaaaaagaaaatatatccaaatataagtgatatataaataaagatgttttatataaatttaactttaaatattctgacaataatatatataaatatattatagttaaaatataccacatattttgggcattgtatactggaattagagtaattaatttattttttaacatacaaatgattttatgaaaaaaaacaagactcaaaaatttttatattctttgatagaataaaattgagagtaaatttattgaattttataaaatttataaggggtgagtctaagatatgcatgaagataaaaatgatatatttgaatcaatagatactgaggattttgataataaaacagaagaagaatgtttagagctagtaagaaaaaatggattgaatttaatatacataaaaaatcaaacagaagagatatgtctagaggctgttagacaaaattgtaatgcaataaaatgtgttcagaatcagacagaaaaaatatgtatagaagcagttaaacaagattggagaatgttagaatttgtggaagagtcaacagaagaaatttgcatgttggctattaaccaagatggaacagcattaaaatatatagaaaatcagacagaggagttatgcttaagagccgttgaaaaaaatggtgcggctttggagtatgtaaaagaacaaacagaagaaatatgtatagaagcagttagaaacagcgaatttggattggcaagagtgaaaaatcaaacagaaaaaatatgtatggaagcagttaagcattgtagctataatctaaaatgggtagaaaatcaaacagaagaaatatgtatggaagcagtgagacaaaatgggcttgatttgaaatttgtaaaaaatcaaacagaaacaatctgtttaagagcagtaagacaaaatggaatggcattagaatttgtaaaggaacagactgttggtatatgcttaaaggcagtaagacaatatggaatggcattaaaatttgtaaaagaacaaacagaagaaatttgtacagaagctataaaacaagataaaagagcacttagttttgtaaaaggagataaggaaaaatacaaggctctatatgataataatgaaccatttgcaaagagatatgttagaaatgtaatagaaaaagaaaacagagcattgattaaaaaaggagaagaaaatgcaaaaatcaaaattgcaggaaaactttatgatagaggcatgtcttttgaagatatatcagatatagttgagattgaaataagcaagttaaaagtgagtttaggtgttttttaaagtaataaatgtaggtgttttttatgggaaatagttaataaaaaaataatcgactagctctttgtaggacagcaaaattagtgatataatttgatgtataataaattatttttattagataagggggaattaaagttgaagattacagtattataccaaacaagaagtggaaacacagaaagggtcgctaagctgatagaagatggagctaaaaaggtggatggagtagatgtaaagcttatgagacttgataatattgatttagattatttaaatgaaagtaaagcagtaatatttggaacacctacttatttagcaaatacaacttgggaagtaaaaaaatggtttgatgaagattcaaaaaaagttaatttagctggaaaattaggagctgtttttgctacatgtgattatatatgtggaggtccagatgttgcgatacttactatagtaggacatttgatggttaaagggatgcttgtgtattctggaggtggttctttaggaaagccatttatacatttaggacatgtacattcaattgaaggtccagagttacaagatgagaaggctataatatttggtgaaagaattgctactaaggcaaaagaactatttgcttaatttctatatgcataataatgattagagtaaatttagggttttaatggagatttgaagtaaaagttataaaataaaaaattttccataaaattactcaagatgaattataatataattataaataaattatattattaaaatatttaaaatcaaacgtcaatagcgagggaagtttatggtatggcatatagaatatgagattttttctgcaattatagttatttttttaatggtatacttttttagaagtaaatttatacctactttacaaaacaaaatatattgtgcacttttaatattctcatttttatttatactttcaaatattttaggttcattttgtctaaataatatagacaaaattccaatttttattacttttttattgaatcagatatacttattgttattgccaataccagcagctcttgtatcattttatgttatggctattatttatcaagatataaggtatatgaaaaaaagattattatttttatctataccacttataatttgtataatcttatctattacaaatccttttacgcatattctatttggattgtcaaaagaaacaggttatatacggggttgtggatatgttgcaacttttgcatcttttttcttttatgcaatatattcagcatttttatcttttaaatatagaaaagcaatgcatgaatcaaaaatatgggctattagaggttttcttatagtttcaattgtggcaattatcttacaggcaatttttttacagtatcttcttacaggaactgcatgtgcatgtagtttacttttgacatatctttctatgcagaatcgaggtcttattattgatgaccttactggtgtactcaatagacaatcttttattcaagagctagatttgaatatcaatactgaacaatcaggatttattattacaattgcgcttgatgattttaagtttatgaatgaaacttttggaacaaaaaatggagatattgcactaaaagaagttggaaaatatttgattcagatacatgatgtaaaccatgtatatagaatagggggagatatattttctattgttgtcaatagtcaattaggtatagaaccagatgatattatcagaaagatagaagaaagatttaaaaagccttggctagtagaagagataagttttaatttagcaactagtattgctgttgtttattacccagaaaatgcagaaacgacagaagatgtaattgttgctatagatttctctatacatgaagcaaaacgttctgagtcaaggcgagttgtttatgcagatgcgtctataagtgaaaagataaagaagaaacatgttattaaaaattgtttaaaagaagcattaaaaaatgatgggtttgaagtgtactaccaacctatattttctaatagcaggggcaggtttacttcagcagaggcattacttaggctagaacacaaagagttaggttttatacctcctgatgaatttattccaattgcagaacaaacaggattgattaactcaattggattagtagtctttgagaaggtatgtagatttatagctagtgatgagtttgaaaatttaaaattggataatatagctgtgaatctttctgtagtacaatgtatgcaaaaaaacttagctgatgatttactttatcttatgaataaatataatgtatcaccaactaaatttaaacttgaaattactgagactgtggctatgggctcttttaatataattaaagaaacaatggaaagattaattgatttaggtgttaagtttgcacttgatgattttggaattgcttattctggagttactaatatgctttctttaccattttcagtaattaagttagataagagtttgatttggtctatgaatgaagatagtaggcataagcttacagttgagacgattatagctcttataaataaattgaatatgaaggctgtagcagaaggtgttgaaaccattaagtgtgctgaagatttaatagctatggagtgtgaatatttgcaagggtattatttttctaaaccagttccagaagatgtttttaaaaatttgttgaaagaaaatacttttacaagttaacaccctttatttttttaattacaactttgttcattgacactgccagcgatatattataaaattaacacaataataaatattaaatttattatacatattattaatattaattaatggagtaaagatttattatattttatttaattatcctaaagtgagaaaggaagatgtgacatgaataaaaagaaaatattagtgccaattgatgggacagaaagaagtatgcattctttggaatttataaaaggaatatttaaaaaagatgaagttgaagtagaaataatgaatgtaaaagaactagtatttattgatggcatatccctggctgaagagataaaaaattctgaaaatttaggaagaagaatcttggataaagcagcagagataatgggagagtatgatgttaaagtacattttacttttggatatccaggagatgagataattagaaaagcaaaagaagataatgtagattttatagttatgacaaaatctactaaaaaaggtcttacaagaatgataggttcagtaacagcaagtgtagttaaacaagcaaaatgtatagtgatgattgtaccggagtagaattagaaaggtatttgaaatatgaataaaaagatagtagcagtttgtgaaagtgaaagaagtttaaattctcttaagacagctgcaaatgatttaggatttgatttagtttatgaaattcaagaaaatgataatataaaaaatgaactttctatttatgatatagaagatgcatctatagtgttatttgttacaagtgattctatagaaagcatagagaagattgatagatttatagatagagaattttatgaagttgatccaaagtatataatagaggatgcaaaatctatagtaagtgaaattttaatagacttaaattaatcgtgggtgtcgcactaagaatagagcgacgcctttttacatattttacataagaaataaagggctgtctcaaactatagataagactctttttcattgttgaaatgatgaaaatatatttgatttcatacaaaaaagagtgcctcataactaaaaagttcactttgagacactccatttttatatgttagttgcatttaaggtaaaatagaagtttaatcatgttgaaataactgaattacatcttctaaatgattgtacattgatgtataacctaagtaagagtctttactatcaaatgccatcattatcttgttatggtggctaatcatatccttaagagaatttctatatttaaaaccgaagtattggttagaagaaactgttttaggtattaactcataatattttataaaaattggattatgagaagctaaaattatctctttgtgaaattgtaagtcagcatcataacattcttctatcaaaccatgagaaaccttatccaattcctctattgactttaggtaagtatattttattttttgaagttctttagatgtagcatttaaaattgctagtttagtagcttcactttcgataagttgtcttgctcttaaagattctacataaaattcttgtatgttatgatttttatagatttcaccatcatcaaataggtcaacttttttaaatccttcaactataggacttgagtaaggcacagctctaagtattccttccttacagagtatatttatggcatttcttacaggtattctacttatgttaaataggtcagcaatctttctctcacttggtaatttactattaattttaaaagttccatttagaatgtttaatttaatataatcaataattttttcagtggcatttaagcttttcataaaaactcctaaacatataatttttttatgattgtattatatcatagttaagagttaaatctacttttttataatatgtataagacaggatagaggccaaaatagctataatagccaagataaagtatccatattgtattgaagtatattccgatattttaccaactatcattggaaatacagacattcctatagcataaattgcttgaaaaaaacccattgcagtagatttctgatgttttggtacatttttcatagactcgctagtaaggtaagaaaggagtatacctgtagatatacctggtagcacttgtagtacaaatattatattaatattttttattgttggaactaaaaagcaataggctgaaactaaaataaaaactaaaggaatccaaaattttggcccatacttagtacaaaatttagtagaagcaaagccagaagaagcaacagcacacaccatgtaagatatagaagatagacctatgagggtagaactagaacctaagtttttaagaatttgagtagtaaatgacattgttgtagacatttgaataccctgttgaattaatgccataaaggaaaaaaatacaagtcttttatctttgcagatagataaatattttttaattgatattttttcaggtattttttttgaattatgattttttatatttaaggctagaatcgttccaataactgaagacaatacactcatgatacataaggctgtcattcctaatttttcataaaataaagtactcataacaaatccaatcaacattcctagattgtttaccaatattatcgtactcgtagctttttgttgatgttctgtagaaaaaaagttggtatagtgaaccatgtaagaaatccaagttgatgatgatattccagataaaatgttagctataagaaaaccattgcctccaggagaaaagactcttataagagatgctaaaccagcaaagaaaattccagacagtataaatattttatgtttatttatagaatcagcaaatactccaacaggaatccttaataaacattgtgagattccatatgcacctattattataccaatcatatttgtagatacattacatgcacttaaatatggattttggaaaggtatatatacatattgtgaaaaccagaaaaatgtaacaatagaaagtaaaagtaatttttgattagatatttttttcatattatcctccatatggtatttttataatgcaaataatataccatttagattttttaatcaagtactttctctattaaaaaaaatttaaatatataattattatttacaaaaaaattatactttatagttgaattaagaaaacgcttatgatactataaagttaacaaatttgaatatataacagtagacgtgttactggtaatgcaggcaagatcgaatcaatttttatagattatctatagagtactatgggtataatctatttatttggttcgatttttttgtttaattggccataaaacaaaaagcctatagttgaaaatggaggattttttatggattataaaaatatagctcaagaaattctactaaatgtaggaggaaaagagaatgtaaatgaagtgactcattgtatgacaagacttagatttaaagtcaaaagcgcttctaaagtgaataaggataaattatctaaaactgaaggagtaataactgttgttgagagtatgggtcaaatacaagttgtaattggaaataaagtaaaaacagtatatgatgaggttataaaaattgtacctcaatcaaatgacgtaggtaaaaagaatgaaagtcaagaaaagcaaagtataattaattctatattatcagcagtagctggtatatttacacctacaatacctgctatagcaggggttggtatgattaaaggtattttatcagttcttgctatgtattatatgaataaaaatggagtagatataaaagaaacgcaaagttatattatcttaaatgccatggccgattctatattctattttatgcctattatactaggatatactgcggctaaagtatttaatgcaaataaaataatatctatggtattaggagctacactttgttatccaacttttactgctttgatggcaggtgaagaatctgttagatttttaggattggcagtaacaaaagctacgtatacatcatctgttattccaataattattgctatatgggctctttcatacgttgaaaaagtattagaaaagtatatacctgaggtaattaaaataataatggttccaactttatcattggttgtaatgttacctgcaacattatttttatttggaccaatcggaatttatataggaaatgtcataaacttttcttataagtatatttatgaattaagcccagcgttgtgtggagcatttgtaggtgggttatggtgtgtgttggttatatttggtgctcatagagcattattaccaataggtataagtgatgttgctcaaacaggaagacagaatttattggcatttgcaggagctgcaaacttttcacaagcaggggctgctctaggagtattctttaaaactaaaaatcaaggactaaaaacaatttctatgtctgcaactataacagctttatttggtataactgaacctgcaatatacggtgccaatcttagattaaaaaaacctatggtatgtgccgtaatatgtggtgcatttggaggtgcgataatgggaatgggtggagcttatggtaatgcatttgcaaaccaaggtgttttaactatacctgtatatgctgaagcaggtgcattaggtttcttaagttatctaggtggttgtgctatagcattttttggttcagctatttcaacttatctagttggatttgaagatttggaagagtcttctaataaggaaaattcatttataaaagtagaaacgaaggatggtgttattgatataacttcacctgtagagggcgaatgtatagaattgtcagaagtaaaggatgatgtatttgcttcaaaagctatgggagaaggtatagctgtgttacctacaaaaggagtaataacagcccctactgattgtgaagtagcttctttatttccaacattacatgcaataggattaaaattagataatggagcagaaatgttaatacatgttggaatcaatacagtagagttaaatggtaaatactttacaaaacatgttaatcaaggagatttagtgaaaaaaggtgataaacttatatcgtttgatatagataaaataaaaaaggctggttatgatgtaactacgccagttatagtaaacaatacatttgattttgggcaagtagtttcttgtaaatctagttatgtttcaaccaatgataatataatttcattagtattagctggtaattaagttaatttgactagagataagtaaattgatttaaaaggaaataagtaaatcaacaattaaatacatctaaaagtaagtttattgcaatgaattgttaaagaaaataattaatatggagtaaagctattgcaatgaagtaacaaagaaaataattaatatagagtaagtttattgtaatgaattgttaaagaaaataattaatatagggtaaatctatctcaatgaaataacaaagaaaagagttaatatagagtgaacttattgcaatgaatcaacaaaaaaaataatcaatataaaaaggagaaatatttatgaatacaggatttccaaaagactttttatggggagcatcatcttctgcatttcaagtggaaggagcttgggataaagacaataaaggaaaaaccgtagccgactataattcttttaaaaagtctcatttacaggcagatactaaagttgcatcagacttttaccataattatgaagaagatattgaattaatgaaagaattagggatgaaaacatatcgtttttcaatttcatgggcaaggataataccagatggtgaaggagagataaaccagaaaggtttagacttttataataagataatagacaaactaatagagtgtgatattgagccattcgtaactttataccattttgaccttccatttaaattagtagagaaatataatggttgggaaagtagagaaactgtctatgcttttgaaagatttgctaaaatatgctttaagcattttggagatagggtaaagtattggcaacctcataatgaacagaatttaattgttagagtggaggagagaattaatatatatgatgaaacagattcatggaagatagataaaatgcgtgctcagatggattataatctttgcttagcacatgcattagcagtcaatgcatgtcatgagatgataaaagaaagtaaaattggagcagcagtatcatcatctgtaacatatcctcttacttctaagccagaagatgtatatgcagctagaatgaatgataattttaaagtgtactatatgcttgatatgcatcattatggagaatatccagggtattatatgaagtatcttgaaaaaagaaatacagttcctcacatggaagatggggataaagagatacttaaaaaagctaaaatggattttatagctgtaaattattataggacaaattgtgcagaagctttacctgaagattcacaacatccatttggattaagagaaggaactgttgattttagtatgtatggactatttaaaatgtcaatgaatcctaacttagaggcttctgagtatggagcagcaatagacccatcaggtcttagagttgccttaaatgaatattggcaaagatatcacttacctgttataataacagaaaatggtctaggagctaaagatatattagaagatggaaaaattcatgatgactatcgtatagactatttaagaagtcatataaatgcatgtaaactagctattgaagatggtgtagagatgattggatattgtccatggtcatttacagaccttttaagttcttctcaaggttttaataagcgttatggacttgtttatataaatagaactgaccatgaagttttagatttaaaaagaatcaagaaagatagtttttactggtataaagaagttatagagaacaatggaatagtaaaataaacataaatatatattgagggttttagtatgtacattacaaaggtattaaataattcgttgctacttgcaaaggatgataatgatgaagaaataatattgatggggaaaggcattggccataattataaggccgggtctgagttaaataaaaaagatatagaaaagatttttgttcttcatgatgaaaatataaaaaagagtattatacaattggcaacagaaatagatgcagaatattttggtatagctcaaatgataattgcatatggaatagaaaaatataacttaaaacttatgaaccatatatatttggccttaactgaccacattgcctttgcagtgagacgctttaaagaaggtataatgattgaaaatcactatttgttcgaaatcaaggaatttaatccaaaagagtatgatataggaaaatatgctattactgtttttaaggaggttcttggtttagacctaccagaagaagagattggtaatatagcaggccattttataaatgcacaacaagataatccttatagtgatagaaataagagaagtgctaaaattgtaaatgctattttgcaaatagttcattatcacttttctattgtatataataaagagtcattttattataggagatttgtaatgcatctaaaggccttttcacaaagatttctggctaatgaaccatcaagagaaaaaatagattttatatatgagcaagttcaaaaaaattgtaaggaagagtatgaatgtgtgaaaaaggtaggagcttatatgtataaggaatactccagagaattaccaagacaagaggagttatatttgatgattcatattcataagattttaggagaattatgcgaaaatagttagaatatcttaatatgctagtaatattataaaaaattaaaaattaactacactttaaatatgaacaattgcattacttaagggggttgtcttaaaattgatttttttaattaaatttgaagctcaactccttttttaaacctttatatcattacaactttaatgtttatacgcctgtactttagatgtatatctactttttacatttctcaacatgcaaacctaccattttttgcagtatgttaattgaaataaaccattgagttaaccctaaatttattctggacttataggaatagttccaaagatactttaaaatattttctggaataattgcttatttcacatatgttttattgtgatgttttgatttaataaattcttcaactctgtatatagtaaatgtattatcatgtttgttttattcaagcacacttataatacgcttgattttttcacaatgatgaaatatactaatgggtgttataggtataagaatcgaattacacttgaagaagtaagtgataaatgagatataaatcctcatatgataaactactatttcattgaggaacatattctaagtgatgtcaagatactacaatatgactaaattcctagtgataaaaaagtctacgaatgagtgtagaaaggggaactaagatgaataaagttttaattatagatgatgataaagatctttgtattttgttaaaaaagagtatttcaattgaacagattgaagcaaactattgccattctgggagagatggactggttgaactttcaaaacaagattatcagttagtagttctagacgtgatgatgccaggtatggatggttttgaaactatggaacaaatacgaaaatatagcagtattcccatcttaatgctgacatcaaaaagcgataattacagcaaagtgcatggattgcgagctggtgcagatgactatctaaccaaaccatttgaaattacagaatttactgctcgtgtactgtctttaatccgacgttacacccgttttaatccaaaaaatgaggaaccacagcaactttctttcaaaggtttgttgattgaccttgaccagcatacagtgactaccaatggcgaacctatgttgcttccacccaaggaatttggtgtgcttctttactgtgcaaggcatcagggtaagattttgacaaaacagcagatttatgaagctgtgtggggtgagccatatgtatatgatgacagcaatatcatggctattatcagtcgcctaagaaaaaaaattgaactagacccatcatctcccatctatttgcaaacaataaaaggaattgggtatcaattcaacacggaggtatgaaaatggatgaacaaacgataattcttttcttattcttgctgtcgattggtctactttttctttccatatttgctttttccaagcttgggcatattcacaaacgcctaaaagatatagaggagatactggctgatgtacaaattggaaacgaaaatcgcaaaatactaattaagccatgtgatgttatggctccattggtttatcagcttaatgagattgtctacgattatgaaaataagttactttctctgaaaaagtcggataaagctagcaaacaacttatgacaagtctatctcatgatgttcgtacaccattaacaactctgattggttatctggatgctgtacacagtggtatagttatcggacaagaacgggaggaataccttgaaatcgctaggcgtagagcctacgacctcaaggattacattgatgttctttttgactggtttcggttgaactctgatgaatttacgctgtcaatagaatctgtggaaattgcagagttgtcacgcaatattttgaaagactggattcctatattccatgaaaagaaactgaattttgaaattgatattccagaaaatcgactaatggtaaatctcgacccagatggatattcccgtgtggttaataatctggttcaaaatgttcttgctcacagtaaggctcggcaaatcaagattaccatgagtgaggattccagaatggtattactccgtgttgatgatgatggtgttgggattgccagagaaaatttaccacatatttttgagcgactgtataagtgtgataaaggacgttcagaaaaaggaagtggtcttggtctatctattgtcagtcaaatggtggagcgaatgggtggtcagatttccgtagaaagtgagattggaaagtataccgtatttacagtgagcttaccattaatataaaattgtttttcccccatgtgacatgtatacacagggggattttttgtaagttataaagttgcaaggttaatacaaggttgttgcaaggttaatgtaagattgaggtggtatgatagctttaataaacaaaggaggattttattatttatgaataatttaattattgaaacaaaaaatctcactaagcaatatggtgctcaaaagagcgtttctaatttgaatattcacgttcagaaaggtcgcatttacggattgctaggaagaaacggtgcgggtaagacgacaactatgaaaatgttattgggtctaacaaaaccaactactggagaaattaaaatatttggtcaggacattcacaataacgagaagaagcttcttcctcgaattggatgtttgattgaatcaccagggttttatcctaatctgacaggaacagaaaatctcaaaatctttgcaaggcttagaggaataccaaaaaaaaatgcagtagaatcagcactggatgtagtcggtttgccaaacaatgacaaaaagttattttctcaatactctcttggtatgaaacagaggttggcgattgctcttgccattatgcatgacccacaactgttgattttggacgagcctatcaatggacttgatcctattggtattgcagaagtaagaaagtttattcgtgatctctgcacagaacgaggtaaaactattttgatttccagtcacattctttctgaaattgccttgttggcagatgacattggtattattgaccatggtattttgttggaggaagaaagtcttgcccaattagaagaaaaaaacagtaaatacatacattttgctgtatctgatgcagcacatgcagcaaggcttctggaaacccaacttaacctgaaaaatttcaaagtagcagataattacaatattatgctatatgatacagatgtttctgttgcagaaataaatcgtgctttcattctaaacaacattgaggtatcagaatctcatttatgcgaagatactcttgaagattacttcaagaaagtaacagggggtgaaggaattgcttgatataatttcatgtgaattttcaaaactcaagcggttaaaatttatactgatttctattttaggtgcttgcttatttccaattcccgcaacaattttgattgcaaaggacaacttgccctttgagcaattgttcaaattagttgtcaattttggatattttttgctattaccaattgtattaagtattgttgctagccaactattttttatagaaagagataacgatgtattaaaaaatcttgcaacagtgccagtgccaaaaggaaaactggctctggcaaaattggctgtgttgctgtttatatcattgttctactccgttgcagggttaggagctactatcattggaggtttcattgttggaatagtagagggggttactgtaaaattaggaatgagcattgcttttggaattatgttttttgttactgtacttcctgttgtggtactcattgtatatttcaatcgcagctatattttttctattatactttcttttgtatatgctattttcaattttagtatatccttaaatattatcaattttgaaccaaataacccactattaagcgtattacctgctcctgttataatgcgttggtggatggcattttggggagatcccactggcgaatacacggcacttagacagccatatttgctctcaactcctgcttgtgtaggtattttatgtttgataaccattatagcagtcctgctgatttgtatgatatacaaaaagcaggagaattaggaggtatctatgcttgatataattactacagaatttcaaaaaataaaaagatataatattctatggattggtgttgttgctgttctgttttcagcactattggcagtttttcaggttgtaagttcacacggcagtgaccctctaacgtatgagagctttgcaaacggagttatctggaataatttcagtcttagttttccatttgggattacacttattggaggatatcttattaaccgtgaatatacagaccaaaccttaaaaaacatcctaactgttcctatttcattacgcaaattgctagtgggaaaattaattgcggttggaggaattgctgtattgttaagtcttttcagcttcttatgcacatttattttggggttgttattttgcaatatcaatatatctgttacactcattgtaaaatccttagttcagattttgtctgttaatctgtattgttatgttgctgttttgccgattattgcttattttggtcgtaaacaaaatgcatttctgacgggtgtagggattgcatttgtatacgggttttgtggtgtgtttgttgctggaagaaatctgacagacttttatccaatcacagcaggtcttggtctagttggatacaacaatggtgctggtactgtttatcagccacttatcggtgctatgactttgattgtaattctaatcttgacaactattctacttgtatttacacctaattatgataaagttatgaccatatctaagaaaaaagggataaagcataaaaagtattctcataaataacataaatattgtttctattatttaagttgctagacagtgaaaagaaaaaatctgtcgtacagtggctatatgctcatgtattcaagaagctacagttttgatttttcataactgtagcttctttttgtatttattaaatcacggctatcataatacttgcaataggtatagcgacaagagagagtactgtcatgtgtgttttatatattacattaagtatattctaaaatatatgttttaaataatatatttgaaaataggaatatttaaataaaaaaaataatattatatatagttgacaaaaattggcaaatgatataatatataaatatagaaatagtaatcattactattattaaaaagggaggaattaattatgaacttaaaaggaactaaaacagaaaagaatttaatggcaggatttgcaggagagtcagaagcaagaaataaatatacatactacgcttcaaaagcaagaaaagaaggttataatcaaatagctgctatatttgaagaaactgctaacaatgaaaaggaacatgctaaattatggtttaaacttttacatgatggtatgccttcaacagaggaaaatttaaaggatgcagcagcaggtgaaaactatgaatggactgatatgtatgcaaaatttgctaaagaagctagagaagaaggatttgacaagatagcttatttatttgaagctgttggaaaaatagagaaagagcatgaagaaagatacttaaagcttttagaaaacttaaatgaaggaaaaatatttaaaagagatgaagaagttgtttggcaatgtcaaaactgtggtcatgtgtatgtaggtactgaagcaccagaaaaatgcccagtatgtgaccatccaaaagcgtatttcaatataaaagctgaaaattattaaaaattatcattattaaaaaggaatgttaactatgaaattttctaaacaacgagaactgattttaaatgaaatattaaataatccggttcatcctactgcggattacctatatgaaaacttaaaaaaagataatccaaatttaagcttaggaactgtttatagaaatttagctcagctaacggaacatggctttataagaaaggttagtattccagggtatccagatagatttgatggtcgaatagataatcactatcatatcatatgtgaagtatgtggagaggtatacgatttagaatccgaagttcttaataatttacaagaattaatatctgaggagacagacataaaaataacatcttataacataagttttaaagggatttgtaataattgtaaaaggtgtagccaagtaggttagttttcaaattctaaaaataattaatgaggtgagtttatgtgtagtgaacaaaaattttttatatgtgagacttgtggaaaccttgtaggaatgatacaaagtggtggtgtacctattttctgttgtggaaaacctatgaaggaacttgttcctaatacaacagatgcagcagttgaaaaacatgtacctgtaattgaagtggatggaaataatgttactgttaaagtaagtagcacaactcatccaatgactaaagaacatcatatagcatgggtgtatcttatgactgaacaaggtagtcaacgcaaatgtctagcagtagatggagaacctgtagttaaatttgctttgaatgatgatgataaagtgatttctgcctatgcttactgtaatttacatggattatggaaggctgaactgtaatatttaaataaattgagtcaaagaggaggctataaatgtattttcatacaaatagcctcctataaatttatataaattcaagttttaattttgtttaatgtcaatataatataaggagaaaataatatgtcaatttataaatgtagtgtttgtggatatatttatgatgaatctaagaatgataaaacatgggatgaattaagtgaagattgggaatgccctgtatgtacaaaaggtcgtagttattttggaaagataagcactgtttactatgaagaagatgaaaagatagcagaagacatagttgaaaatgaatctaaattaaatactgaaaaagagggagatttaaattacttaagtacatatttaagaagagatgatgaagttgagaaacatatggatataattcacgaaatggctgttacaggaaaatctataatagaacctatgagaactaaactaccagtaatttcttgggatgatattttaattatgggtgctcaattaaatccattacctttaaatgagcatgatgaagtaaatacaacaacaataataggaaaaaaagcaaagaaacctatgattatagaaaatccagtttatatttcccacatgtcatttggagctttgtctaaagaactaaaaatagctttagcaaagggtgcagcccaaaataagacagctatgtgtagtggtgaaggaggtatattaccagaagagaaggaagcttcatacaagtatatttttgagtatgtaccaaataaatatagtgtaactgaagaaaatcttaaaaattctgatgctatagagataaaaattggtcaaggaacaaaacctggtatgggaggtcatcttcctggcgaaaaagtaactgaagaaatagcaaaagtaagaaataagcctgtaggtcaagatgtaataagtccatcttgttttgaggaaatacaatccaaagaggatttaaagaaacttatagatgaacttagagaagtttcagaagggcgtccaataggtgttaaaatttcagcaggtcatattgaaaaagatatggaatttatagcttatgctaaacctgattttgtaactattgatggtcgtggtggagctactggagcaagtccaaagttgcttaaagatgcaacttcaattccaacaatatttgctctttatcgtgctagaaaatacatagatacacatggattagatatagatttggttataacaggtgggcttcgtatatctactgattttgctaaggcaattgctatgggggctgatgcagttgctattgcaagttctgctcttatggcagcggcgtgtcaacaatatcgtatatgtggttctggtaagtgtcctgtaggagtagctactcaggatgaggaattgagaaaaagattacatatagaaaatagtgctaatagagtggcaaactttttaaatgtaagtttagaagaacttaagacttttgctagaatttctggtcataaagatatacatgatttaagtgttgatgatttatatactgttaactctgaaatatcaaattatacaaacatacagcatgtatagattgaagtttgaaactattagattttagatagctataaaagtaaatgataaatatattttataaaagagagtgtcttaaaatgaactttttagttcataagtcactcttttttgtatgaagccaaatatatttatcattttagcaatgaaaaagaatcttatctctttattttgagatagactccttctatttatgaaaattaaagatattaaattgtaaaatattctgtgatgtcgtactattaaactaaagattctgtactttaaagtaaataaaaatttaaggagtgcttattatggaaagattgaagatacaagttttagttgacaataatacttatattgatagatactttgttggagaaccagcagtaagctattatattgagattgatggaaataggattttgtttgattcgggatattcagatgtattcatatcaaacgctgaaaaattaaatatagatttaggaaatttaactcatgttgttttttctcatggacataatgaccatacaagaggtatccagtttttagaaaataggtatgatttatctacagttgaacttatttcacatcctaactgttttatacctagaaaacatggagagaaaagcataggagctccattttctgctgaggaaattaaaaatatttttatgtataatcctaaggataagccatttaatctaagtaagaattgtgtgtttttaggtgaaataccttctataaataattttgaaaaaagagctaaaattggtaaatgtaaaataggagatttgtgggaagatgattatgttttagatgattctgctatagtttgtaaaactgataaaggtatttttattgttacaggatgttctcatagtggaatttgtaatatagtagagtatgctaaaagggtatgtggagatgatagagttattggtatactaggtggttttcatctttttgaattgaataataggttagatagtacaatacaatatttggataaagaagaaataagaatgttgtacccttgtcactgtgtttcttttaaggtaaaagctaagatgaatgaaatattgaatataaatgaagttggagtagggctgaccataagtatatagtatttgaaagtatataagatttaagttgaaggttaaaaagatattttctatataaagtatcttttttgttacgtttattttaagagaaatcaatatacttttatatgaaatattgtaaaaaaatttatttttaatgagaatatattttcattaataaacaattttattatgtattaataatgctagaataaatataaataaatcaaagttacttacattaaagtatattttttcacaaaatatattgatttattcttttaaagtttgataattccaatgaatgtaataaaagaagggattttatactatacaattattattataaaattataaagaaaaaattaaataataataaagaaaaaatgtataatatttaacattaaaaaagatatttcataaaattaaaaaacaaagtgaatttgaatactatttaaaaaataaaaaaatatataaaaaatatttaatacaaaggtagaaataagttgaaaatgtaaagtcattggaaaaatatagttgaatttaatgaacaaaaatgttattgttttatcaatgaagtgttaaaataaaaactttcaatatcattttagggaggatgatttcatgcaaaaaagtgtaaagaaagcaaaagtaacgggatctatgttagccatttttggtgttgcaagcgttctttttagttcacatgcaggaggaggatttgctacagggaatcaagaaactcagtactatgtgcagtatggatggacagcaccacttatggcaattttagcaatgattatacttactgctaccatgagagaagttatcataatgtataataataacaattgtaggaattataaggatttattttgtgagctttggagaccatatccaaaacttgaaataatatgggagatatattactatctaatggttttaatagctgtaagtgctgttatagcaggtgcagcagcagtatttcaaagtataggagtaaattattttgtagctgtatttattattggagttgtacttcttgtctttactatatttggtgctatgcttgtatctaaagcagctacagcaatgacaatagctattctagtatgtactcttactatttttattgttggtataaaagctaaagtaccagaaataactgaaatattatcaaatagaacgagtttcacacctggctatatcaagccaatacttaatacttttatttatgcaggttttcaatcggttgttatacctacacttgcaggatgttcaagaccacttcttaagaactcaaaagaagctactaaggcaatgataatttcatttgttatgaatgcaattgcattaggacttgctgtaactatgctaatgggatggtatagagaaattattgctgctgggcaaacaacactccctactctttatgttgcaggtcaatctggaaatcatactatatacataatttataatgttgcattattcctttgtttaatgtctacaggagtaactactatatttggtcttgtaaatagatttgaagaccataaagcactttctttcctttcttcaagaatgaaaagaagggtatttacagcttgtgcaataatggtagtgtcaatgcttatatcacttacaggattaagtaatattgttaaatatggatatggatattgtggttatcttggtctattcactatagtaattccattccttacactaggacattataagaataagaagtttgcaaaggaaaatccagaagctaaatggccagcggaattaaatgaaaatgtaaattagatgtagtagcaaaaaatattgctaaagagaatactataaataagaatactatagataatatatctgcatgtttattaagattatttgcaaaatctaatattgaacaactataaacaagcaatataaaactaagaataaaagataaaaagagggtgtctcaaaatggacttttagtttataaggcactcttttttatatgaagtcaaatatattttcattattttgacaataaaagagactaatcctactttggatagcctcttttttctttaatataaaatagtataacagcaaagtatagattgatacatgttttctgtagctttctatatattacagtgtttgtgtggcattggtattttaagcaatctataaattataattctataattcttctactaattttagattctatagccgtctctatttcacttaacattcgttcatttttagggtcaataaaagcacatgtatagccttcttcaccagctctaccagttctaccaatacggtggatgtagtcttctggtgtttctggtaaatcgtaattatatatatgacttactccagatatatcaaggccacgagaagctacatctgtagctattaagtattgtatatctaaatttctaaatgatttcattattctttctcgttttgattgagcaatatcactatgaagtttttgacaattatatcctcttatagcaagagcttcttcaagattgtcaacccttctcttagtcctacaaaatattattgccataaaaggattatcttcatctagtaccttacataaggcatctaatttttttctatctgtagtttctactacttcttgttttatattattaagagtgatttcttctttttgaatagaaactacaacaggattttttgtgtatctataagctaatttttttacttgagaatttatagttgcagaaaagcatagtgtttgctttttgtttgaagtctcttttaaaatagcttccacttcgtttttaaatcccataagcaacatttggtctgcttcatctaaaacaaaagtctttaacttactaaggtctattgtttttctatttagatggtctaaaagcctacctggtgtagctataatcatatgaatatttccttttagtttctttatttgagaaccaatatcttttcctccatatgctgcaagaatacttacatctttagattctttaagtttcatagcttcttctgttatttgaatagctagttctcttgtaggagaaagtataagtacttgtatatcatttatatctaatgatatattttcaaatatcggaagtaaaaaagctagtgtttttcctgttccagtttgagcttctgctattacatcttttccttcttttattagtttaatactttctttttgtataggtgtaggtgttgttattcctgatttttttagaatatttattgtattttcactaatccctaagcttttgaaatccattgttatcttacctttcatgaaaaattttcttttttattaaccaattaataatatcatatttgtaagtatttttagtaaattttttaattattatttatatagcttaaaaatatattaagatactttaaaatggaatgtaacttaacttaaattttagtaggaattttataggtttatttttaaaggttttttgaaaataaatctatttaaaaattaaattaaaatgcaagaaaaacataataactttcatttttaagaagttttcacaaaaaagaaaaaatatagtgcaataaatgatacaaagtaatataatagattacaagatatgaaaagctaaaaaaataaattgcaaatgaaattaaaatgaataaaaaataaaaaaataatcataagttagaggtatcaatgaaaaataagacttaatgtttttaaaattaaaagtatactaaggggggcattaatatgtgcgttatatcaaaagatagagcaaaggaaataaaaatagtagatactactttaagagatggagagcaaacagctggggttgtatttgcaaatagagaaaaaataatgattgctgaaatgttaagtgacctaggtgttgaccaaattgaagttggtatacctactatgggtggagatgaaaaaaatgtaataaagcacatatgtagtagaaatttaaaatcagatataatggcttggaatagagcagtaataaaagatgttgaagaatctatttcttgtggtgttgatgcagtagctatatcaatatcagtatctgacattcatatagaaaataaattgagaacttctagaggctgggttttagaaaatatggctaaaacagttgaatttgcaaagaaaaatggattatatgtttcagtaaatggagaagatgcttcaagagcagatatagacttcttaactgaatttataaatgttggaaaacaagcaggggcagatagatttagatactgtgatacagtaggagttatgaatcctttttctataaagaatgcaatagaaactctttatgaaagaactaattttgatatagaaatgcatacacataatgactttgggatggcaactgcaaatgcacttgcaggaatagcagcaggagcaaattatgttggtgttacagtaaatggattaggtgaaagagcaggaaatgcagcattagaagaagttttaatggcacttaagtgtgtttataaatgtgatttaaataatatagatactagaaaatttagaggaatatgtgagtatgtagcacaggcatcaggaagaatacttcctacatggaaaccagtagttggggataatatgtttatacatgaatctggtatacatgcagatggagctttaaaagacccgcataactatgaaccatttgacccaagtgaagtaaatcttgaaagaaaaatagtaataggtaaacattcaggaagagctgcagttataaataagttgagtgaatatgaaatgtatatttctccagaaaacgctaccaagctattaaatgctataagagctacatctataagattaaaaagaagtttaatggataaagaaattcttcaattatattgtgatatactagcacatgagaaaggcacaacagaagaagaagcagttagaggttcatatatttaagatataattgtttaggaggaaaatatgggagataatatagtttataaaataattaaaaaacatatagtagatggagaagctgttgctggaagttcaattggtataaaaatagaccaaactttaacacaagattctactggaacaatgacatatcttcaactagaagctatgggaatagataaagtaaagactaaaagaagtgtggcatttgtagaccataatatgttacaacaaggatttgaaaatgcagacgaccataagtatatacaaacagtggcagataaatatggagtttatttctctaagccaggaaatggtatttgtcatcaagtatttttagaaagattttcaacaccaggagatacacttttaggttctgatagccacacacctactgctggaggtgtgggcatgatggctattggagctggtggattagatgttgctttagccatggcaggaggagcatactatataaaagcaccaaaagtctgtaaggtgaatctagttggaaaattaaataatatggtatcatcaaaagatataatattagaagtgttaagaaaacaaactgtaaaaggtggagtaggtaaagtttatgaatatggtggagaaggtgtcaaaagcctatctgttccacaaagagctacaataacaaatatgggggctgaacttggagcaactacttcaatcttcccaagtgatgaaaaaacactagaattttttaagagtcaaggaagagaagacgcatggatagagttaaaaccagatgcagatgcagtttatgatgaagagattactataaacttggatgaattaaaaccattagctgcaaaacctcatagcccagacaatgtagatgaagttgaaaatataggcaagattaaaatagaccaagtggcaataggaagttgtacaaattcttcttatgaagacttaatgaaagtagcacaaatcctgaaaggaaataaagtacataaggatgtgagtttggtaatagcaccaggttcaagacaagttatggagatgattgctagaaatggggctttggcagatataataagtgctggagctagaatactagaaaattcttgtggtccatgtattggtatgggtcaatctccaggtactgactctgtgtctttaagaactttcaatagaaatttctatggtagaagtgggactttgtcagcacaagtatatttagtaagtccagaagtggcagcagtaagtgcaatcaagggagtgcttacagacccaagagaatttgatattaaatttacaaatttagatgtaaatgaatttttgatagatgatagcatgataattaaacctgctgatgtaggaagtaatgtagaagtagttagaggacctaatataaaacctttccctcttaatacagagctaagtcagtctataggtggaaaagttatattaaagacagaagataatataactactgaccatataatgccatcaaatgctaagttacttccttttagaagtaatataccgtatcttgcaaactattgtttcaatactgtagatacagaatttcctcagagagcaaaagacaataatggtggatttatagttggtggagataattatggtcaaggttcaagtagagaacatgcagctttagcaccattatatctaggtgttaaaggggtaatagttaagagctttgcaagaatccacaaggctaacttgataaatagtggtataattccaatggagttttgtgatgagaaagattatgaaaatatatctcttttagataatctggagataccaaatattttagacaatctaggtagtggaattttagaagttaagaatacaactaaaggaacttcttttaaggtcaaagtagaattgtcagcaaaagaagttgacgtattaaaagctggtggaaaattaaactacactaaaaatcaagctaattaatatgaaaagagggaatattgaatgtataaagtgacacttataccaggagatggaataggaccagaagttgcgaaagctatgaaaaaggtagtagaagctactggagcagaaatagaatgggaagaagttaatgcaggagaggcagttattgaagagtatggtactccacttcctgaatatattatagatagtataaaaaagaacaaaatagctataaaaggcccaattactactcctgtaggtaaaggatttaggagtgtaaatgtaactttaagacaggcattagatttgtatgtcaatttaagacctattaaaagttttaaggggataaaatcaagatatgaagatgttgatttagtggttgtaagagaaaatacagaagatttatatgctggaatagaacataaaataggtgattatgcagctgaaagtataaagataataacaagaagtgcaagtgaaagaatcgttgattttgcatgtaactatgttaaagataataagagaaaaaaagttacagctatacataaggcaaatataatgaaaatgtctgatggattgtttttagatgtgtttagagaagttgcatcaaaacatggtgtagaatatgatgatttgattgtagatgcagcagctatgaacttagttttaaatccagaaaattatgatgtaatggtaatgccaaatctttatggagatatactatcagatttaggtgctgggcttgttggaggtttaggtataattccaagcgcaaatattggtaaagattgtgcgatatttgaagctgttcatggaagtgctccacaaatagcaggtcaaaataaggctaatccaacagcacttattcaatcatcagtaatgatgcttagatacttaggtgaatatgaaaatgcacaaaaaatagaaacagctttagaaaaagtatttcttgaaggaagtaaattgactgtagatttaggtggctcagcttctactacagagtttgcggatgaggtgtgtaagtatattgtatagattttatttagggaaaaagtgaaatatagattgaaggaaagaggctttctcaaaatagagataagcctttttttattggaatgataaaatatatttgattttatacaaaagagagttcctcataaacgaaaaagttaattttgggatatccattttaattttaaaattaattgattaatacgcaaagaaagattaaacaaatttattatttttaattgaactttcaaccaaaatatggtaaaatttaaaaaagttgaactttcaactaaaaataaatatattgattatgtgaaattctataaaacagaaactatttgactttagtcatggtaggttcagtggaggtgtgtttgattaagactttagatagtaatatattaagagaagtaggtactttatctagagcagtaaattcaataaatgatattaagtacaaggaattaaagttacaaaaaggacaatttacatttttgacaagaatctgtgaaaatcctggtataaatcttgtggaattatcaaatatgttaaaggtagacaaggctacaacaaccaaggctatacaaaaactaataaaggcaggatatgtagataaaaagcaggatgagtttgataaaagaggatataatttaactccaactgataaatctttggaagtttatgagttgataattgaagaagagaatagaagtatagagatatgttttgataattttacagatgaagaaaaacaagtggtaactaagttattagaaaaaatgagcaaaaacgtagaaaatgaatggtttaaagtaaagagatagtaaataaatacattaacttaaggagatatttttatgattagaaaagcgaatatgaatgatttagaaagcattatgaaaattataaaatctacagtggaagaaatgaagacttataataatacacaatgggatgaaaactatccattagaaaaagactttgtttcagatattaagaaacaagatttatatatttatgaagtggatggagaagtagcaggatttatatgtcttaattatgaagagccagaagaatatttaggcttaaattggtcatctaataaaaaagcaatggtaatacatagaatggctgtaaatccaaactttagaaagacaggaatagcatctaagttagttgattttgctgaaaaattagctgtagaaaacaatgtatcatacttaaagagcgatacatattcaataaactcaaaaatgaatttattacttacaaagtgtggttttataaaaatcggagaaatgagttttttaggaaaggagaaatctttctactgttatgataaaatattataaagagcatttataatacaaggggtaaataatagattttcagcattagtaagggcataatataacccagtatatgctattatgaaagggatgatttatatgattggatttctaaagaaaagaagaagtattagaaaatacaaggatgttgaagtagaaaaagaaaaattagataaaatattaaaagctgctcttttagctccatcatcaaaggggcttagaacatgggaatttatagtggtagatgataaagaaaagctaattaatttatctcaatgtagaactaagggtggtggatttttcttaaaaaatgcacctttagctattgtaattattgcagataaagaaaaaaatgatgtttggatagaggatgcaagtatagctgcttcatacatacaacttcaagctcatgaactaggtttaggttcttgttggatacaagtaagaaatagaatgtatgatgataatatagaagctgataagtacattagagaagaattaaaagtacctagcaagtacagtgtagaatgtataatttctataggatattctgatgaagaaaagaaagcatacaatgactctgatttagactataaaaaggttcattttaacaacttttagtatataatatgttgtattaagacattatatttttttctattgttaatatatacttaaaattgtaaaaatatatctgaattttactaacttatctaggggttatgtacaaggattttaaagataaatatagaaattaatgtttataatcgatacataacttgagtaacaaaatttaaggaggttaaagtatgggtatatttaaaacaaaaatggatgaggactggaaagtaaactacattaaagagtttaatgaaatgagagattcttatgagagtaaacttcaaaaaaaacagtttgaggtagatagtttgaaatcagaattggatagactaagaagctataaaaatagccttaagccaaaagaaaaacaaattactgatgatgatataaataatataaagagtttaagaagagatggcttaagctataaagaaatttcaaatcaaacaagttggagcaaagcaactgtaagtagggtattaaatggactttacgattagcatatacatggggtgatttaaattgggatgaagtatagttacaaaaaatgcataatagattctattttattgatgtttataattcaaatattaaggatgattttgaattatgtacttctaagtcaatttgaatttactcttgaaaattttaatattataaacttaatttcttttacattagttggtttatcgttaattttatttttaaaagataattctttgtataacaaggttagaaatagaaaaatcacagaagcttttgaagaaaataaaaacaatatacttattgaaaagtgtaagcttatactttttgttgtggttttatctttagcaataattgtaacttattgtactaagggatatgtactttttaatgtaactatgatgactttgtctgtattgatagttccaatatttgaagagttattttttagagaatatatatggaactatctaagtaattttataaagtcaaagagtaaaattatctgtataacatctatactatctggaatttataatataggatacatagatgttataagaaattatgtaatattgtataacaattcaagctacacctttgaagttattatttcaaaaattatgataggtactgtttttggtattgtacttggattagttaagtataggtttagagatgtagggttttgtatattattgaggagcttatttgctatatttattaggtagatagtataatcggtttataaggttgttttaaatttaattttaaatcaaccttattttatttgtgttttataaaacacttatatattaataactaataaatttaataaagattatttgaatatttttaaaatatataaatatgtattgacatataaatattatgaattacaatttatataaactaataaaaattaaataatattaatcaacttattgaatggaggaataaaaatgaaatttgtgactttttgtagtagcaatgaagaaaaaataggtgtatttaattcagaaacaaatagtatatatgaaattaatagtttaggattaagtaaattatatactgatatgaatgattttattgaaaacgtatctacaggagatttagaaaaaataaaaaacaattcatttgaaaacgcaaagtgttataagttagaagaagttaaattatgttccccaattgtaagacctaaaaaagatattatatgtttaggtctaaactataaagaccatgtcaatgaaatcccagatggagttataaaaaacgtagttatgccagattatccaatttatttttctaagagagcagacaaaataattggagtggatgataagataagcttacatggagatttggtagagaagttggactatgaatcagaacttgcagtaatcataggtaaagaaggtataaatatatcaaaagaagatgcttatgaatatatatttggatatacaatagtaaatgatataagtgaaagagcacttcaagataaacatgttcaatggtttagaggaaaaagcttagacacacatacatctatgggaccttgtatagtacataaagaagaatttgaacatcctttaaaattagatataagtagtgtagtaaatggagaagtaagacaaaattctaatacagagtactttatatttgatatacctactataataaatgatttatcaagaggaatgactctaaagccaggagatataatttcaactggaactccagcaggggttgctatggggatgaatcctcaagtatatttaaagcatggcgatatagttgaatgtaaagtcgaaggaataggagttttaaaaaatatagttgattaatggataaatatgccatataattttattagtacaaataatttaattaatataggattgatcaaacttatgattaatttattatagagagggatgagtatatggcaagagaactagaattaaagtatggctgtaatccaaatcaaaaaccatcaaagatttatatgaagaatggagaacttcctatagaagtattaaatggaaaacctggatatataaattttttagatgcatttaatagttggcaacttgtgaaggaattaaaagaagctacaggtcttccagcagcaacttcatttaaacatgtaagtccagcaggagcagcagtaggggtacctttatcagatactttaaagcaaatatattttgttgatgatttagagctttctccattagcttgtgcttatgcaatggcaagaggagcagatagaatgtcttcttatggtgattttatagcactttcagatgtatgtgataaggagactgcaactattatagcaagagaggtttctgatggtataatagctccaggatatacagatgaagcccttgaaatattaaaaggaaaacgtaaaggcaactataatattgtaaaaatagatgaaaattatactcctgagcctattgaaacaaaggatgtttatggaattacttttgaacaaggtagaaatgaaatattaataaatgaagaactattaaaagatattccaactgcgaataaaatttttacagatagtgcaaaacgtgatttaattatagctcttattacattaaaatatacacaatcaaattctgtttgttatgctaaagatggacaagtaataggggtaggtgcaggtcaacaatcacgtattcattgtactagacttgcaggtaacaaagctgatacttggtatcttcgtcaacatcctaaagtattaaacttaaaatttaaaaaggatataggtcgtccagatagagataacactattgatgtatatctttctgatgattatatggatgtgcttgctgatggcatatggcaaaacttttttgaagaaaaaccagagcctctaactggagaaggaaaaagagcatggcttaaaactttaacaggagtagcacttggttcagatgcatttttcccatttggagataatatagaacgtgcaaaaagaagtggggtaagttttatagcacaaccaggtggttctattcgtgatgataatgttatattaacttgtaataagtataacatagtcatggcatttactaaaaatagattattccatcattaaaatactgaaagtataaagataatatagattaagtaaaaatctacaacaagttttgttgtagatttttttatttgctgtataattttaaatagaactttatttttagatattcaatttggaggttgatatggctttaaatataagaaactatagcctattatgtaatcaaggaacagctaaatttaatgaagatgtagtcggtataaatccatttggggcatgggttttagatggtgctacaggacttaatggaaaaaatttagtgtcaaatgaaagtgacgcaaggtggtatgttcagtggtggaataggtatttatataaaaatataaataaagaagaatcattaaagagtattattaatactggaataatagaagtaaaaaaagagtatgaactaagattaaatgggtttaaggttgaaaaattagatttaccatctagttctatagttgttgtaaaatttcatgaaaataaagtagagtattttttattaggagattgtgctttgtttattaaaaatggagattccaaagttataaaagataggagtatttgtaaatttgataatactgtatttgatgaaatgagtaaactttctaacttggaagagatggcatttgatgagattagaactagtgttatggatacaatagtaagcaatagattgaagaaaaatacgaaagagggctattggatattggattttgatgaggaagctgtggaaaattctatatatggatacattgaaataaaaaaagattttcaattgatgctaacgagtgatggttttacaagtgcatgtgatagatataatctaataaaagaagaagaattgatacgtatagcagaaaaatttggtataggatatatacataataaagtaagggattttgaagataatgactataaagcggttaaagtgccaagatttaaaataaaagatgattcatcttgtttatatttagatatatataatgattagactgtataaaactatttaattttagaaaggaggcaagtgaaaagtgaaaattcttcatataataacacaaaaaccaaatagtacaggtagtggtatatatttgtctggtatgataaaagggttcgaaaaaatcggtcataagcaagctgtaattgcaggtatagatgtaaatgatgatgtaaattgttttccaagtgaagtaagtttttatccagtaaagtataattgtggggagttaaattttcctgttgtaggtatgagtgattctatgccatatgaaagtacaagatataaagatttaaatatagacatgataaatagattgaaatatcaatttaaagtaaatatagataaggctatgaatgattttaaaccagaacttataatatgtcatcatttgtacctcttaactgcatttgttagggaaatagtaaaagatataaaggttatgtctatttgtcatggaacttgtttaagacagttaaataccattgatttagagaaagaatacataatagcaaatataaggaaattagatttaatatttgctcttcatgaaaatcagaaatatgatattataaagacttttggagtaagtgaaagtaaagtagttgtaattggtagtggttataatgatgatatattttataataaaaattataaaataaaggatgataaaataaaaatagtatttgcaggtaagatatgtaaatcaaagggattgattccatttataaaatctatatctaaattaaaatatagtaaagatttaatagaagtcaattttgcaggtactggaagcgatatcgaatcatataatgagatagttaaactggcaagtaagtctccatttaaaatgaatttcctaggaaagttagaacagagagatttagctgagctattcaacaggtcacaaatatttgtgttaccatcattttatgagggattaccagttgtagttttagaagctttatcttgtggcacagatgtaatcactactgatattcttggtgttaaagagtggattggtagtgagattaataattctggaaagatagaatatatttctctaccttttatggagaaagaaggtattccaaaagatgaagagttatatgattttgaaaataatttgtataatgcaatagattctaagatacaatctttattgaataactcaaatgagaaaacatctgtagatatgtcaaaaaaaacgtgggatggcttagcatatagaataaatgaagttattttaatggatgaattgtgtttagtctaaaattatttaaattataaaaaagtgtaactatttttaaactttttttaaatgattttatattatactaatactaaatatatttgttttagggaggtaatttatgaggattagtaaaaaggtattggcgttaggtatttcagcattactgttaagtgttagttttccaacatcaataaacgcactagataagattgaaaatattcaaggagtagataaatatgaaacagctgggcttatttcagataagcaagattttacaacagcagttcttatcaatgcagattctacaatggtagatgggattgctgcaagtggtcttgcaggagtaaataatgcagctattttattaactaataaggatgatataccagaagcaacacttcaaagactgaatagagttactaagatatatgtaataggtggagaaaattctataagtaaagatgtagaaaaaatgttacttatgagaagaatgcaagttataagaattgatggtgtagatagagtagatacaagttataaaattgcaggtgaaatagaaaaaattaaaaacagtgataagatgtttttagtaaatggatttaaggatgaagctgatgcagtaagtgttgcatctgttgcttatagagatggagctcctataatattgacaaaagatataccttcagcagaagaagacacagacttagacccatggtttggagtttctcctgttccagtatatgctattggaggagagtctacattaagtgattacatagtgagcagatatagagcaactagaattggcggtgttgatagatatcaaactaataaaaatgttattgaaaagttctataatggagcaaaagagttctatataacaagtggagacgatttagtttatgctttagttgcatcaccacttgcaaaaaatgctcctgttgttttagtttcaaataaaagtgataagagtatattaagtggagctagtaaagtaacagcaataggtataagtgataagagtattatagagcaatgtttggatgctgtaaagaagtaatggagtgttattagtaaaatgaatatatacattgaaaattagtagattgttcattttataatggtataaaatatatgggaagaggctatcaaatggagataagcctcttttttattgataaaattatgaaaatatactttattttatataaaaaaagtatctcatgaactaaatgtctattttgatatactatctccttttcttatattatatgtattatatgattttttatatggaataaatttcataagtattatcttcctttaatttttctaaccaaatcatctctaaaatatctagttcttctaaatagtctttctctgttttgttatcatcatgttttataagttctaaaacttcaaatgtaaatgctttttcaccatattttttccattcattatttaattcttttatcatacatgagccagcaccaagctgaaatttgagagagttaaatttgctttttatgtcattactttttccaaggtaaatctttttagtaatatcattttttattatgaatacacctgtgtcaaatttcatttctttgtataattgttttaattcacgttttctatccatgattttagatacctctctttataattgatatgtaatatgtaagtttaaaaatatattacatatcaattataaagagattaattttatatgtaaatagtttttataaatttaattatgaattagtcatcaataaacaagaaatttagctgtagaaatccattataaaggctattataaattttaatatgctaaaaatataaaaagaatagttgacagtatagaaaatatggaataaactaaaagtgtaatagtaatacgaaattatatattacattgaaaggtgtgaatgattattatgaataaaaaaatagaattaatagggaattttgcaagtgattggattaggtatagtgattatgaatataaaattactgaagaagatgaattatatatagttccaacagaagatgctgtgtttaccatgtataacccatttgatgtagcagatgatataatagtagatataattcgcataggacaagaggcattacaagatatatcaaaagagacaaaagaaatgaaactaaagaaagaagtacttgaatttgtaaaaaagtatggattattgggtttaatatattcaagtgtatataatagagatatagttggagaagaaagagtactgatgattgaaaagaattatattacaaaagagaatatattgagtacagatgaatatgtaaacatgtttataccatttgcaagtgatgaagatgtgtattttaaaaaatatagaaggggtatagatgtatcaaagagagaagaatctccaaagttttttggaaagagaccattgattttagatttagtattttcaaagttctacactgaacaactagattggattgtaagttttgctaaagatatgtgtaagcattttaatcaaatttgtgtatataaaaatacatctaatctattaactgaaagtgttactattatgtctggagggtttaatcctcaaaagataggattttctataagccaattagataaaccaattattgcatgggagtttgattctttgaaaacagctattgagactatctatgcctttgcaattacaagtgaaccttcttctttaaataaatgcaagtactgtggtaaaatttatattcctacaaattctaaatctcaatactgttcaccttcttgtagaaattgctcaaatgtaaagaaaagtagaagtagagccaaaaaagataaataaaattaataaatatatcattgtttagattttagtaaataactactgaattaaaagttgttatagaaaattatatatctaaatgatggtatttttttgttgagaaaattgaaaagtttaattgagatagtaattttgagttgacaaaaaccacttttaacactactattataagtggttggtaaaataatatacactaatttaaatatagcataaaaaacaaaaaaagtcaatgaaaaaaataaaaaaggagaatttaaaaatgatatcacctattattttgagttctataaatcagaatttaaaggaaatagaaagaaatgaactgcttgaaactaatatagaatctggagattatggtctagctctttctgaatctgatgtaaaagatataataaattcgagagataatactttaaaggggtatggaagaatagaattagatataaaagttacaaaacagttaatagaaaatatatatacatcacaatatacaaatgtggacaattatttagaggctattaatgatatgcaagaaattttttattatttaaaaaatgaaactgatgacaagatatgtgatgatgagattatagaaatactgggtgaattttatgaaaaattttcaggcaatatggacaatgtaagaggagaagcagacgaatttgcaaagaaatttaaatttggagaagtttaatatatgataggagagattttgtatgttaaataatttaagtaatattaatataaacgaaaataatttaataaagaaccaatattccatatctctacttaaggaatgtctaaattgtaaagtgatagatgaaagagaagtatataatatacaacaagaaatatctctaatacttatggatttgattaaaaaatatacaaatggtcaaagcacatcagtaaaaacagaagttgccgaaaaactgttgatttcaatatggtatgctattgatgcatatataaataagcttggagatatagaaaaaagagttgtggagttgactgctaagaatgttaaaaaagtgtaccttggaggcattgaaatattagaggaagagttagttaggctgaaagatttttataaactaatgatgagtagaaaattggatactaattcaatagcatataatgataccttgatggagttatcaagtttctttaaaagttatattgtaaaatttgaagctcaggacgttccagtaagtatagattatccattggcactagatgatatggatgttaagggtatttattatgtgaagaattatattgagagtatagatatagaaaatagattttgtaacctatttaagaaaaaagatagagaaaaattattttatgactatggggtgatttataaaatagattgtgatgttatacttgtaaatttatttgaacttattataaataattgtattttttctactattttaggaaatgaagtgattaatttagaaatttcaaaatatgagtatgaatttttagaaaaacaatttaaaaatatgtacaataatattactgaagataaagttataggctctgaagaaagtaatataattgaattgattgaagtagatgatagttttaacactgaagtagatagtaatttggattataatgattttgaagaaattaacagagaaattagaataaataaaaaaataactttactacttatggaagcaattgaagtattaataaaaagattaagcatagaagatgaagatgtaataagatatattaaaaaatatgaaaagatatttattgaatctgtgctaagctcaataaaaagtaacacttttaaaagtatggtaactgtgagtaaaaataaaaatgaacacttagaagactatattgttgatgatgaaagtaaattggatgatgaatcgtttagagagatattcaatgagatattagatagtacatctataattgaaaaaataagaataataaaggaaaatatcaatgctaaaaaagactttatcgatattcttgaatctgaatgtttatttggagaagagtatttaatgttgtttgcatcattaagtgaattagaattggcaatattgggtagtgtagtattttatgaagatattagaatgagagaaattaatatattagaatttatgttaaatgagaaaactgaaactactttatggaagacagagtacattaaatttatgaagaggcaaagtgaagataagatatactccatagaagagcatatgaataaaattaattaacaaaaaattgtgaataaatagaatgttagtatataatataatctgtaaagcatatcaaaaatacatatatttggaggaaaattatgaaagagtatatcataaataatgttgaagaaataagagaagaattaattgatttatctaagaaaatatgggaaaatccagaattagcctttgaagaaaagtatgcaagtagcattcaaaaagaatacctaaagtcaaaaggatttaaaattgaagaagtagaaaatttacctactggatttatagcaagttttggagagggtaaacctgtgattggcatacttggagaatatgatgctttaccagagctatcacaatgtgtgagtgcagaaagaaagccattggtagaaggaaaagctggacatggatgtgggcataacctgttgggtgtagcaggtgtaggagcagttgtttctataaaaaaattaatagaagaaaataaatttaatggaacaataaaatattttggttgtcctgctgaagaagaaggtggaggaaagacagttatgtgtataaatggctgttttgatgatgtagattgtgcatttacatggcatccttttgatataaatgcaccttggagaggtggaagtctggcaaacttatctgtaaaatttaaatttaaagggataacagcccatgcagctcaagctcctcataatggtagaagcgcacttgatgctgttgaaattatgaatgttggagctaattatttgagagaacatgttattgactctataagaatgcactatgttataactaatggtggtggaagacctaatgtagttcctggatttgctgaaagttggtactttattagaggtaaaaaagcaagggatgcagaacatgttcttgatagattaataaaagtagctcaaggagcagcaatgatgacagaaactgaaatggagtataaggttacagatggaatatatgactatataccaaaccaatgtttgactgatttagtttatgacaatatggtttttgttggttgccctaaaaatactcctgaagaagaagaatttgcaaaaaaattgtgtgatactcttactagagaagaaagattaggtgtagcaacatcattacaaaatgataaatctattgtagaaagttatatacacaaggaaatagttgacggtgacaaagataaaggactagctggttctactgatgttggagatgtaagttatgtaataccagtggctcaatttgcaatggcagcttggcctgttggaattgcaagtcatacatggcagtcatgttcatcagcaggttcaaatataggattttctgctatgataaattcagctaaagtactggcttgtagtgcttatgatgtatttatgaatactaaaattattgatgaagcaaaaattgaatttgataaatcattagatggacaaaaatttaaaccattggtataattttggtaataaaatatttctggggggaatagctatgagagaaaaagttgaaaaagtgcttgaggaaaagataaaaccagtattacaaagagatggtggagatgtagagcttatagatgtaaatgaaaatggtgtggttttagttagactacaaggggcatgtagtgggtgtccaggagcgactatgacaatcaaagctattattgaaaatgttttggtgagtgaagttccaggagtaactcaagtattaggtgtttaatagttagcgtttattaaatgtatgttatacataagtatttaataaagaagtaaaaaaaatagtgaagcaatatatatgaaaaagtatgataaagataataaaacattatagaaataatgaaatatttcatatgtatatgaagaaataagaaaaaatagtgaagcaatatatatatgaaaaagtatgataaagataataaaacatttatagaaataatggaatatttcatatatacatatgaaaaaatagtaaaacaatatatatatgaaaaagtgtgagaaaataataaaatactatagaaacaattaaatattctatataggtattaagaaacatgaaagaaataatggagtattatagataaatatgtaaaagtgtgaaagaaggatgtagataaatttgtcttatacaaatttacctacagtatttcttacacactttttattttactatccaaccataccaataaacatacctataaagtatggaactaaccatatagtccatacaactatactaaacttatgaaagaattttttcttttcctcatcatctttgtataggacaaaagtagcccaacttgcatgaaaaagcataagcacaattgcaagaagacctgtaatactatgaaggttttgtgataaagcagattttacttcaaaagtatggctgttggctatgttactcattgtaaatgttcctaaagtatcaaatataaacccaagccaaaatataattacatgtttcttttttaaaatttttgcctttctttctccaaatacacctatagtgtagaaaattaaagctgatgttataaatactattgcaagtattaatttataattcataattatctctcctttacttttgccaatatatttctaagattttttactaagtcactcaattcgttttcatcacaatttttaaaaatatcatcaaaactttcttgcattttaattttaaaatttgtggcaaattcaaatcctgttgttgtaaacttaacgtatgtatttcttttatcattagatttcttgaatttttctatatatccaatctgttctaatctgctgattatgcctgaaaccgtacctttagctaaagacatttcatcacatagttgtgatattgtaagttcttgattatgagctaccagttttataactataatctgttggtgtgttaatccattttctttaaaattttcttctactgtgtacatagttttagaataaagttcttttaagagcatggctattctaaaacagtcataattacttttcaataaaatcacctcttaaatggtttgcatacaaactaatataatatacttttcttatatagtcaacctaaaattttataattttatagaaaataatgaagaatagaacataaaaattttattttaggtataaataaaataatttgatgaaattttaacaatttttaaaaagtttgtttacacagttaataaatgatgctaaaattaactcatagataaatatagaaaatttaattttgtttaatgataatggaaccacgaaggttttaacgttactttacgtttgcttttatgtggtttttttattgcaacaaaggggggttggggtttgttaaaggatatactgaaaaagttgttgcagtttattttagtaatgtttttattatcttttattgttttttacatggcaagacttgctccaggagacccattaatctcttactatggggatggagtagaaagaatgagtacacaagaaaaagaaaatgctatgaaaaaacttggtttgaatgaaccaatatacagtcaatatataaaatggatttcaaatgcatcaaaaggggaatttggaatttcatttaaatataaacaaaatgttacttctgttataaatgatgtctatataaacactataatattaggtggttcagggtatatacttacctttgtgctagccttattgttaggaatattttgtacattacatgaagataagctcattgatagaatcatatgcaaattaggaacaataaccaactgtattccatcattttgggttgccttagtactcatacttatatttagtataaacttaagtatacttccaagtagtggtgcttattcaatgggagaagagtccagtatattaagtaggatatcacatctaatcttacctcttacagtacttatattaagccatctatggtattacacatatatgataagaaataaattactagaggaaataagagaagattatgtgcttttatgtaaagcaaaaggtttaaataatagaactattgtttttaagcattgcctgagaaatataatgccatcatatattagtataatggccatttcgatacctcatatactaggaggaacttatgtagttgaaaaagttttttcttatcctgggttaggaacactttgttttgaaagtgcaaagtatcatgattataatatgttattagttttatgcttaataacaggggctttagtagtatttgggaatatgttagctcaaattataaacaataaaatagaccctagaatgaaatatgatagaggtgatactaatgaagccacaatatagtgattttgaaattgtaggagaaaattatattttagtagcagaagatgaacatatagaaacaaagaaaaccttatctaaaaaaattaaagaattaccatatatatcaattattattttatcaatcatagtcattggaagtgtattctcatcttttataatgacacatgaaccaacatacatggatttagcaagttctaatttagctccaaataaaacttttttatttggaacagactcaatgggtagagatatatattctatgatatggtatggaggaaaaatatctttatttataggactattttccactgtaatatcaactgttataggaattgtttatggtagtataagtggttcagcatctgaactcgtagatgatgcaatgatgaggtttacagaaatcatacttagtataccttcaatattaattataatatttgtacaagctatacttggaaattcaaatccagtatctatgtccatagtaatagggataacaagttggatgaatatatctaagatagtgagaacagaagttagacaaataagaaatagcgaatacatactagcagctaagagcatgggaggaggattcttctatgtattaaagcaacatttacttccaaattttgtggcatcaataatgttcatggttgtaacaaacataggcgcagctattggtactgaatcgacacttagctttttaggaattggtttaccaatagaaattgtttcttggggaagtatgttatctttgtcagaggaagcattactttcaaatagatggtggattatactgattccgggtatatttttggttaccacattggtgtgtataacaaatataggtaattatataagaaagaataataataaaaaatctagtaatttataaatcagcatttgagtactaaataagcaaatactgaggtatttgaaatatctatttaaataaatggggtcaaagctttgaaaaatattttataaaaagcaaaagggggagcatcatgaaattaaagaagttaaaagttttaagtttagtaatgatacttagtctaatggcaggttgttctagtggaggagacaaagataagaaggcagatacgcctaaagatggaaaggtacttgtttatggaagtaatgactatacaagtataaatcctgcactatatgaacatggagaaataaattcattaatatttaatggattaacagctcatgatgaaaataataaggtggttccttgtctagcaaaggactggaaatttgatgaggcaacaaatacatatacttttaatttaagagatgatgttaagtggcatgatggagagaaatttacggcaaatgatgttaagtttacaatagaaactataatgaatccagataatgcttctgagatagcatcaaattatgaagatataacaaaaattgatgtggttaatgataatactataaaaattactttaaaagctccaaatacagcaatgcttgattatttaacagtaggagtattaccaaaacatgttttggaaggtaaggatatagctactgatgaatttaatcaaaaaccaataggtactggaccatttaaacttgaaaaatgggacaaaggtcaaagtataacacttgttaagaatagtgattattttgtaaaagaaccaggattagataaagtagtctttaagattgttccagatgataaggctaaggcaatgcaattaaaatcaggagaattagacttagctcaaataactcctaaagatatgtctaactttgaaaaagacgaaaagaattttaaagtaaatataatgaaaacagccgactatagaggtatattatacaattttaattctaaattctttaaagataaaaaagctaaaggattaccaaatgctttaagctatgcaatagatagaaaagcaatagttgacagtgtattattaggacatggtgtaccagcatattcacctttacaaatgggaccatataataatcctgatatagaaaagtttgaatataatccagaaaaagctaaacaagaaattgaaaagctaggttggaaattaggttctgatggaatctatgaaaaagaaggtactaagttagctttcgagataacagcaggtgagagtgaccaagttagagttgatatggctaaaatatgtgcacaacagttaaaagaaattggtgttgatgctaaagctgttgttgtaactgaaacagattgggctaatcaagatgctcatttaataggttggggaagtccatttgacccagatgaccatacatataaagtatttggaacagataaaggtgcaaattacagtgcttactctaatcctactatagataaaatacttcaaaaagcaagagaaacagaagataaagatgaaaaattaaagttatataaacaattccaagtagaaatgactaaggatatgccttatacatttattgcttatatagatgcaatatatgttggaaaaccaaacataaaaggattaacacctgatacagttttaggtcatcatggtgtaggtatattctggaacatagctgactggacaattgaataatactgaaattaattagaaaccttagggataaaaatatatccctaaggtttgaatagcataggggttgatggtttttggaacatttattggaggttaataatctatctgtaagttttaaagtagaagaaggagaagttcaggctgtaagaaatgtatcttttaatctaaaaaaaggtgagacattggctatagttggagaatctggttgtgggaaatctgtactgtgtaagagtttgatgaggatactcccatacaatggatatattaaaaatggagaggttttacttaaatcaagtgatttggttaagaagtctgaaaaagagatggaagatataagaggaaagaatatatcaatgatatttcaagaccctatgacatctctcaatccaactatatcaataggaaagcaaattgcagaagctgtaatcattcatcaaggtataagtaaaagtgaagcaaaaaagagagccatagagcttattgaattggttggaattgataatcctgagaaaagatttaaacaatttccacatcatttttcaggtggaatgagacaacgtatagtaatagctatagcacttgcctgtaatccagatgtattgattgctgatgaacctacaactgctttagatgtaactatacaagctcaaataattgatttaataaaggatttacaacataaaataggtttgtcaataatatttataactcatgatttaggagtagttgcaactatagctgatagaatagcagttatgtatgcaggaaagattgtagaaataggaactgtagaggatatattttatgaccctagacatccatatacttgggggttgttgggttcattacctactttagattcacaggatgaatatttatataatatacctggaatgcctccaaatttattgaacccaccaaaaggagatgcttttgcaataagaaataaaaatgcacttaagatagattatgaaaaagagccaccaatgtttaaaattaatgatacacatagtgcagcaacttggttattgcacccagatgcacctgaagtagatgtaccagttagagtaaattgtggaagggtgatttctaatgaatagagaaaaaatactggaaataaaaaacttaaagcaatattttcatttggacaaaagtactactgtaaaagcagttgatgatataagttttgatatatataagggtgagatatttggattggtaggagagtcgggttcaggaaaatctacaactggtaaaactataataagactacatgaatctactggtggagaagtaatttacaaaggaaattgcatatcagataaaaaaacgtacaaatttataaaaaaagatgtaaacaaaagtatgcagattatttttcaagattctacttcatcattaaatccacgtatgacaattgcagatataatttcagagccactaaaaattcaaggtatctgtaaaaataaaacagatagaatgaataaagtatatgagatgctaaagctagtaggacttgatagaagttatgcaaataagtatccatctgatttttcaggtggacaaagacagcgtattggcatagcacgagctctttcagtagacccagaatttataatagctgatgagcctatagcttctttggatgtgtctatacaagcacaaatagtaaatttatttaaaaaattgcaacaagaaaagaatttaacttgtttatttatagctcatgatttatctatggtgagacatattagtgaccgtataggagttatgtataatggaaaattagtagaattggcagattcaaatgaattgtataataatcctattcatccatatacaaaatcactactttctgcaattcctgttcctgaccctagatatgctaagtcaagaaatagaatagagtataattctaatggatatgattgttcaaatgaaaagtcattaagttggattgaggtttcagatggacattttgtatattcttctaaatcagaaataaataaatatcaacaaaatttaaaagttgtttagtataaaaatacttgaacaggtatttatttgaaatacaaactaaaaccctatttttggagaaattttaaaactactccaaaatagggttttttatttctacttttcaaatataataaattcaaatataataaaattaaaaacaagtaaagtatgttgttaagaaagtgctataaaattaaaaatagtaatgtagaaaaaatgagcaataatcttattttttctacaataattttctataatttaaagtaaggaaagtttgataaattataaccttagttaaagaataagagtttattaaaaaataaagtgtgtataggggttttagttaataaaatattataatgtaggggagcttgtaatgatatataaaaaagataaagtaatgaaagttttagaatcatcatatagggaaaatgaaaaagggattacagctaaccaattatcagaaaagacaggaattgcaagaaacaatataagtacatatttaaaccaattattcaatgagggtatggttacgaagataaaaggaagacctgtgtattatatccctgcaaatcttaaccttaacaagaatgaattgcttgatacacaaagtgagttgcttggcataaaaaaaggaacaaaagtagaaaacaaaataaaaaaagatagttttgaaacactaataggtaaagaacatagtttaagacctataatagaaaaatgcaaggtcgcaatgctctatcctacaaatggacttcatactattatctatggagaaacaggagtaggaaagagtatgattgctagatatatgtacgattattctatagatagtggaattagaaaaaataaagctccttttgtaacatttaattgtgctgattatgctaataatgcacaattacttatgggacatatttttggagtagaacaaggagcttatacaggtgcagaatcttccagaaaaggtcttttggaaattgcaaatggagggatactatttttagatgaaattcatagactaccagcagaaggtcaagaaatgttgtttacttttatagataagggaacatttaaaagactaggagatgcaacgaaagaaagagattctaaggtattaataatatgtgctactacagaaaatccgacatcaacactattagatacattcaatagaagaataccaatgaaaatagaaataccatcactgagagataggacaatgattgaaagaatggaattagtcaaaaattttttcaaggaagaatcaaaaagtatttctatttcaataaaagtacataaagaaataattaaatcactattactttatgattgtaaaaataatgtaggtcaacttcaaaatgatataaaattagctgttgcaaatggatacctaagatataaaagagataataaagaaccagtttatatagagaaaaaatattttgataaatctataaatgaagtgagtgatgattatagagagaagtctattaaagcagatgaagttataacacatggaatagaatattttgtatttacgtcattaggagaagaagaagttattaactacaatgatataaatattattaatgcagtaaatactaatcttaataaatctgtagaaatgaatatagcagatgcttctctatttaataatgttaagtttaaaagcatgtgtgaatcaataagacaaattattaaagaagatgaagaaatagatataagtgaatcaatatttaagtcaatggcaatttatataaaaagcgtattggataaaagtagctctacaaacaacatagatttgaatcaaattagaagaaataacagaagtgaatttaaaacagcactaaaaatagttggaataattgaaaatgaatttgatttatttttatctatagaaactgtagcatatattacattattcatagtacaagctaaacaagatgaacaaaataaaatagtgaataacattaatattatagttgctatgcatggagaaactacagcaagtaatggtaaaagcagttggtgatattattggaaagtgcagtgctatttctttcgatatgaagttagataaaagctatgatgaagttattgtagattttaaaaatttaattaataatatagacaataaagatgtattactatttacagatatgggttcattaaactcctttgatgaaattataaagaaagaaaaaaagtgtgaagtaagagtaattcctatggtgacgacattaactgtgttagaagcagttcagaaggccaatatgggattacctttaaatgacgtatacaactctatcactaacacgagaaagtattattttggaactaatgaaattcaaaataaagaaaatctgtctaaaacaattattatagcatcacatgtttcagaaggtgtagataataaaacaagaaaaatattagaagaaaagatgagtaggtacttagatggaatagatattatatctgtcccatataaaacagaaaaagatttaagtttaaatattacaaaacttaaagaaagtagtaatattgttgcagtaatcaatgaacaaagaattaatattagaggaattgactatattagcaaaaaagatatagataaggatgaaaatatcaataaattaaaaaatattataaagataagtataggttatgatgatgtagttgaaggtttaaagacatccttaaaaagctctaattataataggatatttaaagatataaaatatgtgtctgatgaattgtttttagtatttaatatagaaaagaaatacgataaagtaattggacttatgatgcatttagctttcatggtagatgggttgattggaaatactagagaaattgaaaagcttgataaagaaaaaacacttgattatcacaagagcctaagcaaaataaaagatatagtatctcaattagataaaaaatataatatagaaattaatgaaaaagagtgctatcaaatattattaatattagaatatgcagaaataatcgaaaaagattaccaatgagtataaaaacttatttggtaattttttttagtctaaaataatattaatattagacacatataaatatacttagacaaagtatctaagttttgatgataaaaatgattgaaataacagtgttttaaagtgtctaaaaaaactggcataatacttgcttatattattaaatgagtaatataaataattaaaatttaaataaaaaggagtaaataatatgcaagataaaatattaagagataaaaaggcaaatgacccatgggcaagaatgactacaagaaacggatttagtgcagacgaaataatatcgtcatttcaaaaagctataagaagaaatatggtggaagaagcttgtgaatttgcttatgaactatatatatcatcaccagaattagaagataagctatggagaaggatacttacaatatcagttgaagatataggaatgggggacccatcagctgtaataatcataaataatttaaatcaagtaagaaaggaatattcatatgcagatggagacagacctttatttttcatacatgcaataagatatctttgtgcatgtgagaaagatagatcaagtgatttattaaaaaatataattataaaaggatttgcaatgggtaaagttccagaagttatggacgtggcacttgacaagcatacatatagaggattagaaatgggaagggattcattccactttttaaatgaagctagtatagtaataccagaaaaagaagtagataatgattataaagaaagatacttaaaaatattagaaaaatataagcaagaagaagttatagatacggctttcaagtttaatcattggcagtactaagaattagagtaaatattaataagaattaaaataaaataataagaattaaagtaaaaactgataggaattagagtaagaattggctgataaaaaattagaaaataaaagaggttagatattgtaggagggtaattatgaatattttattagtatgtgcaaatggagcttcaacaggtgtacttgtggaaaagatgaaaagtttttgtagtgagcatgaaaagttaaaaactaaaactataaatatagaggcaacatcattcgaaaatttaaaatcatacattgaagctaatgatacagatgtagtacttgtagcaccacaaattaggttcaaggaagatgatgtagttgaagcttgtaagaattacaaaatagcagttggtttaatagatactaagcattatggtcgtatggatgctccttctgttatgaagtcggcaatcgaattatataaaaatagataattggggggaataaaaatggaagcacttcaaaataatttaagaagatttcttctaccaatagcacaaaagattgaaaaacaaaggcatcttcaagctataaaagaaggtatgataagcattaccccaataataattgttggttctttaagtatgttatttatggcattaaacaatatgttacctgaaggaagtgcaaaaacattattatctgaaaatatggatacattacttatccctaataaatttactatgagtttattatctatatattcagcattttttatagctcaggcactagctaaaaaatataatcttaatcatgtagaaataggtatgacagcagttgttgcacaacttgttgtatgtggacaagtagtagatggtgtattagatacaagttatttagatgcacaaggtttatttgtaagtatattagtagcacttttagtagttgatattactaagtttatgaatgataaaaatctcgtaattagatttccaaaagaagtacctagtgtagtaaataaaagttttagaaatttaactccaatgatagtatgtataatgttatttacagcaatagcagcaataactaaaaatgtctcaggtcaaccattaccagctattataatgaatttcttagcaccagctataagcagtgtagataatgtttttgcagtaactataatactatttataactcaattattatggttctttggccttcatggagcagcaataacttcaagtatatggatgccaatagcagctacatatatggcagaaaatgcaacactgatagcagcaggaggagacccaaaatatgtgtttacaataggattttactatggtttcttgcaagtaactggttcagggataactttgggattagtgtaccttatgtcaagaagtaagtgtaagagttttaatagtatgggaaaagttgtgattttaccatcactatttggaataaatgagccagtaatatttggaacaccaatagttatgaacccatatatgtttgtaccatttgtatttggacctgtattggttggagcacttaattttatggcattaaaagtaggattagtaggattacctattgcagaaccaccaggctttttacctccaggggttgcagcatttttgatgacattagattggaaggcaatcgtattagtatttgcaagtataatacttatgaccttgatatattatccattctttaagataatggagaaggaagaattaaataaaaatgcagaattagctacaacattagatgatgatagctttgatttttaacaagtcattagaaggagaaggatatggtacctgaaatggaagaaaaagtatttagtataatatcagaagcaggagatgctaaaagtgatgtaatgatgtctcttaaggaaataaaaaaaggtgactacaataaagcaaaacaccttttaaattcagcctcagagaaaatacaaacagcatcaaagcatcatttagaattactatcaaatgctatgaatagtgaagatagtgggactgattttttagttgtgcactctgaagaccattattcaaatgcattatttgctcattctttagtatctgaacttgtagatatatttgagatgatggacccaagaattaataagaattaaatttcttgtaaatagtgcttgaagtttggctatagtttattaaatcaatagatttaataaatgaactcccttttactttaaagtactagtatttataaatttatttataaatacagtaaatttttaaatagaaaaggagatattattatggaaaaattttcagtagtaatagctggaggaggaagtacatataccccagaaatcatattaatgttgctagataacttagataggttaccattaagagcaatcaaattatatgataatgatgaagaaagacaaaataaggtagctaaagcttgtgaaatactaataaaggaaaaggaccctaatatagagtatttagcaacaacatgccctaaagaggcttatacagatgtagatttttgtttagctcatataagagttggaaaacttgaaatgagagaactagatgaaaagatacctctaaaacatggagtagttggtcaagaaacttgtggaccaggtggaatagcttatggaatgaggtctatagaaggtgttcttgaaaacatagattatatggaaaagtattctccaaattgttggatgttaaattattctaatccagcatcaataatagcggaagctgttagaaggttgagacctaattctagggtaataaatatttgtgatatgccaataggtatggaacataatatagcaaggattgcaggactcaaatctcgtaaacatatggatataagatactttggattaaatcactttggttggtatacttcaattaaagataaaaaaggaaatgaacttttaccaaaattagtagaacatataaaagaatatggttttataaatggtgaagaaggaatgaaaaatgacaagaaagatagttggtttgaaactaatttatttactaaagaaatagtaaaaacagatttaactacaataccaagtagttacttaaagtactatctatttccagattatgttgtaaatcattctgatgtaaattatactcgtgccaatgaagttattgatggaagagaaaaagaagtttttggttcatgtgcattgatagaaaagcaaggacattctaagggcagtgggcttaagataggaatacatgcagagtttatagtggatttagctacagctctagcttttaatacacaggagcgtatgttattgatagttcaaaataatggagctatagaaaatatacaagatgatgctatggttgaaattccatgtatagttggaaaagacgggtatgaaccattatcaatagggaaaataccaacattccaaaaaggtttaatagaacaacaattagcagttgaaaaattagtagttgatgcttggattgagaagtcttataataaattgtggcaagcacttatgctatctaagacagttcctagtgcaacagttgcaaaagaattactagatgatttaatagaagcaaataaaaattattggccaaaacttaattaagaataatatatttttaaagttcctacagtttagtacatagcctagttaatgtatttgtagggactttatttatttacaaatgagatacaagtggcaaacatagtgtattttgcagttaggaaagtaggtttagttacttgttagttggattaaatttaggtacaataatttactatcaatcaatagaaataaccagagaagttgcataataaaaaatttacacttttaacaggatttatgtaggtgtttatagaaataaataaatatgtacataaatacataattatttttaagtctaaaatacaagaatggagagatggctatgaagtggagagattatgctgatgatgtaaatttatttgaggattttgataaaactatcaagcctctaactgacgaacaaagaagaaaaaatataaacactttaattgcatatttttcaaaagaagttccttctaaaatatacaatttatcaaatgatgaaattaagcctagagatatacttagaggacttttgaatgtatatccaccaaaagaaattgctccagagatacttaatatgttacataatttattgttgattgaatgtgaagaaagagagttagtagatgtaaatgatatagaagaagtagaggaagggattgccatatggagaggtaatataacgaatttaagagcagatgcaatagtaaatgctgcaaataacaagttattagggtgtttacaaccattacatctatgcgtggataatgagatacattcatgcgcaggtcctagacttagagaagattgtgacaaaataataaaaaaacaagggcatttagaatatactggagatgctaagataactagaggctattgtttacctgcaaaatttgtagtacatactgttggacctattgtatctggtggtcagccaagtaaagagcaagaaaagcaactgcttcattgttataaatcatgtttaaatacaataaaagaaattgatgaaataaaaaatattgttttttgtggaatttctacaggtgtatttggttatccaaaaaaagaggcagctaatcttgctgtaagtagagttagactatggctaaaagaaaatcctgaaaaaaatttaaaagttgtatttaatgtgtttactgaagaagaagaagagaaatatagaagaatatttaaataatattatgtaacagaatcctaaaaatacttattatataatacaaattcattgtataagataataatttacaagtagtaaaaattaataaaatataatttgtatttttaataaataagtaggtataatagaaattataagaatagtataatcaattatgctattacttagaaaatataatataggaaaattgtatggtaaataaatatgaaaaatagttttaaaaattgtattagtttaagaaataaatttataattatatcaattgtgtttctattaatcctattaattgtatcttatatatttggcaaattagtgtataatagttcggttggtttagagcagttaataaaaaacgaagatatagtaaaaatattttctgagagaaaagataaaccactggagaaattaaaaaactacaagacatctgaattaatgatacaaagttctaataattacaagcttgaaagtctttttataacttcaaatataaagacaagagatactatgatacttgttcatggaattggaagtagttactatgaaatgttaaaggtagcatatagatatttagataaaggttataatgtattagtttataatcaaagaaatactggtaatagtggtggagataattacacatttggtctttatgaaaggtatgatttagatagtctagttaaatttgtaaaaaataaatttcctgaaggaagattaggagtgcatggattttccatgggagcagggacagctgctatgcattcagagataaattcaaaagatgataaggtcgatttttatatactggattctccttattctgaaatgaaagatgcaattagaatgggagtactagaaaaacgaataccagatatattaatcaattatgtggtgatttgtggagatttatataataagtttaaatctggattttggtacagtgatgtaaaaccatatgagtcagttgagaaatctaatgtacccatactgtttatacatggaacaaaagatactgtttgtaattatcaaaatagcaagaaaatgtatgatttagttaaacatgataaaaaagacctatggcttatagaaggtattggtcatgttgatggatttgaacatgatagtacagtatacttcaataaaatatttaaatttatagatagtaatgttttaagtgataaaagttaattgaatattagtagcttatttatttttgtatttattaaaaaatagataggctatttttatgtttaaatataagttttgtttagtaatgtgaattaatttctagtaaaaatgaaaataactaccaattaaattcatttatacctcaaataaaagagttagtattagattacaatcaaatctaaagaaaagagaggtagtatatatgaaaaacaaaaataataaagataaaaacatgttgaatattaaagtattgagagttctaggagtgctattaatactttttgattatacgggtgatactttgaatttttataatttcttcgcaaagccattagtatcgggtaatttatataagacaacaggtactgactgtattgtatttttattatttattgtagagtgtgtatacctagtgggaagatatatattaaaagttaagataaattggagtgagattattgaaaatgagaaaggtaattttataaataacttgttggttgaaaaaatacaagaagaaagcaacattgtatataatttattaaactcatatgtgttgccacatatatataagaaagcaagggtgttgatgtttaaaacatatcatatgttaatctacattaaagaaaaatactattatgtaaatatatattaatataatatgattgcacaattaattatattatattttgtattggatgataaaatgaaagacataaattttttgagacactaaaatcgcaatttatttcgtgtttaagttataaattttgtgaaaaattataaatcttataaaatagattgcgattttaatcttaaacttttgctatagtttttccagtatcagttaaatcatatccgccaagaccttgaagttcagctttaaactcaggagagtttattatgttaattatagtttggtaaactggattttgtaagtcttcttttttaataactaaatcatagcgctctttgtgaagaggaataaagtcgatattatttacttgtaaagcagctttttcatttcccaaaccaacatcagctattccacgagaaacagtacttgcaactccaagatgtgataattcttcattatcataaccttttatatgtttaccattaaagtttagaagtctaagtttaccatctagtaaaaccctagttccagaacctttttccctatttacaatggttatacttggttttgttaaatcctcccaggttgttatctctttaggatttcctttagcaacatagaaaccttgcattctataagctagatttataagtacacatggtattcctggcaatagctttttaacaaaagtgctattatattcatccgtttcgaaatcccatagatgggatgatgctatagaaactctgccattatataactcatacaaagcattataactacctatataagagcgaaatgtacttattccatccaattttttttcaacagacctagctaaaatgtctaatattacatcttgaccagaaataataattttgaaattattatttatatctatatttttattgttgaaatgtgtatcctttactttaccagttttttggctgttgatatattcttcaacatctttagtatcaactcttatttttttccctactttataagaaggaagttcacctcttttgattaattcatatacagtattttttgttatctttaataattcagctacctcgacaggtgtcaaagatgataatgagtccataatccacctccatataaggttattttaacattaaaaaaaggaaaatgtagcaaaatatttaaaagtagtgtaaataaattacttgaaaatttattatcatgtatatataattaaactatatataacaaaacatgataaaacataataaaacatattaaaatgtgtatcaaatttacaaaaagggagattgttatgaaaaaaatattgggaatattaggattagttgcatgtttaactttggggacagttgggtgcaatagtaatgaagacaaaacagatgatggaaaacaagaaaaaacaactaaaagtagtgattcagtagagttaaatatatcggctgctgcaagtttaaaagaagcaatggcaaagattgaagaagaatataaaaaagttgattcaaatgtaaaacttacagttaactatggagcatcaggctcattacaacaacaaatagaacaaggagcaccttgtgatttatttatttcagcaggtcaaaaacaaatgaaagctttggatgaagagaagttattagtttctgatactatgaaagatttagtaaaaaatgatttagttcttatttcttctgctgacagtagtgtatcaggtatgaaagatttgactacagataaagtgaagaaaattgctgttggtgaagttgaaagtgttccagctggtaagtatgcagatgaggtgttaactaatttaaatttaaaagataagttaaaagataagctagtatttgcaaaagatgtaaaagaagttttagcatgggtgcaatcaggaaatgctgatgttggattcgtttacttcagtgatactgtcaataatgataagataaaagtagttgaaaaaacagacgaaaaaactcattcacctattacatatccagtttcagtaattaaagctagtaaaaacgtagatgctgctaagaaatttgaagaatttttattaagtgagtcaggacaaaagatttttgaagaatttggatataaaaaagtagaataaacttataaataaattatgtgtaattaagtataaattatatataaataaatgaaaattgaaaataattgtgtattataataaaatggaaatagtgaaattaatagagttattagtttcactatttccatttaaaattaaggagggaaagatgggaacagattggtcacccttatggatatcacttaagacatctattttgtcaacaataataacttttgtaataggaatatttgtgtcatatattatggctaactatagaggtaagtggaagggtcttatagatggactatttacacttccactaattttgccaccaacagttgtaggtttctttttattattactatgtgggaagaatggatttataggaaagtttttattaaatttcgataggactttaatatttagttggacagcaactgtaatttcagcagtagtggtgtcttttcctatgatgtatagaacttcaaggtcagcttttgaacagattgataataatatgctgtcagctgctagaacattaggtcttaatgaatggaaagtattttttaagattgcagttccattagcatggcctggaataattggtggattggtgctgtcgtttgccagagctcttggcgaatttggtgctacacttatgatagctggaaatatacctggaaaaactcaaactatgccaatagctatattttttgctgttgaaggcggagatatgaataaagctatgatgtgggttatgattattgtagcaatatctatagcaatgattttattactaaattattggtcggaatttcagcaaaaaattataggaaagaggtgtggatagttgagcttatacgtggatattgaaaaagatttatcctcttttaaactaaaggtagaaattaaacaagaaaaaggtactctggggtttttgggggaatctggttctggaaaaagtatgacattaaaatgtatagcagggcttgagaaaccaacaagaggtaaaattgtattaaatgatagagttctatttgattctgaaaagaagataaatttatcaacacaagatagaaaggtaggatttttatttcaaaactatgctttgtttccacatatgactgtaagtcaaaatatagaacttgggcttttaaaactaagtaagagtgaaaaaaaggaaatagtagcaaggtacttagatatacttaaattaaatgggtttgaagggagatatccttggcaattatctggtggtcaacaacaaagggtagcactagctagagcattggcaacatctccagatatattacttttagatgaacctttctcagcactggaccatcatttaagaagtaatatggaaaaagaacttatgaatatgttaaaagattacaagggagatatactatttgttactcatgatattgaagaagcttaccgagtttgtgatgatattatagtgtacaacaaaggagaaggtcttccaaagagacctaaaaaagagctctttgaatctccaaagtaccttatagaagctaagataacagggtgtaaaaatatatccaaattaaatagactggataaaaatactatttatgctacagactggggatgcgagttgacattaaatagagaaataggtgataatatagaatatgtgggaatcagggagcatcatattaaggtcttggattctaatgaagatttaaatgaaaagttatgtttcgaattgattaacattgtagaaaatccttttacatatactatatatgttagaaaaactgatttatctaacgaatgtgtacctattcaaatagaattggaaaaaagtaaaatgagatttaagaaaggtgacagaatatatttagattttccacaggaatatttattttgctttagatacaattataacaaaaaggagtaaactatatgactgaaaaagaaaaaatgttgtctggaaaaggatactatgcaaatgatgaattgttagtaaaagaaagagagtattgtaaaaaattaactagattgtttaataatactttagaggatgaatatgaaaaaagagaagatattttaagacaactatttggttcagttggcaagcaaataaatgtagaacaaaacattaggtgtgattatggatataacatacatgtaggcgaaaatttctttgcaaattatgattgtatttttttagatgtatgtaaaattgaaataggtgacaatgtaatgttagctccaaacgttcaaatctatacagcctatcatccaattgatgcacaacttagaaattcaggcatagagtatggttctcctgtaaaaataggtgataatgtatggataggtgggggagtaatcataacaccaggaattactataggtgataatgtagtaataggtgcaggaagtgtagtcacaaaagatataccaccaaatactgtagctgttggaaatccatgtagagtaataaagaaaatagaagaataaatatgattgtataaagtttatacaagtaaaatttatacaatcatattaagagcatttacatataatctttaaatagataatacattaaaataaaaatatatgcctgtttctataaattaatttatagaaacaggcatattaatcgtatatagaaaatatctttctattcttgtttagtctttacataagaaatattttcattagaaggtttttccatacctaaagcttttaatatatcttcattaacaatgatatctgtatcatctgatgtagccacaggcatatcagatactgattcgccatttaaaattttaactgccatttcacctgttttgtaacctagtttttcgtagttgataccttgacaagcaagagcacctttttcaactggcccagattcagctgctataacaggtattttattctcagtagctattttagagactataggcatagaagaagccactaagttatctgtaggaacatataatacgtctattttgccaactaaactagaaataccttggttaacttcatttgaagtagttatacctttttcaacaactttaaatccatttttagatgcatattcttttaaagcatcaacttgaactttggaatttacttcactagtattgtacataactcctatagtttttgccttaggagcaaatattttaagaagttctaaacctttgtctacagaaacaaaatctgatgttccagatacatttgtgcctggcttttcaagagttttaactaatccagcagcaacagggtcactcacagcagtaataagtataggtatatctttagtagcattaaatgctgcctgagctgatggagtagatatagcaaatattaagtccttcttatcagatgcaaatttactcgcaatactttgtgtagtaggcatgtcattttgagcattttggaagtctatatcaatattttctccatctttaaatccgttcttttctaatgcttttacaaaacctatcctagtggcatctaatgctggatgttcaaccagttgagttataccaatttttttaacttctttacctttagaattactttcttgttttgaattaccagagtctcctccttgtgaacaccctgtaagcatagatatactaagagcaccagctaaaatcaaacttgccaatctttttttattaatcatttttatatccccctcaaaaatttattattatatatgttcatatattcatatgaattattacaaagtaaccataattattgtaattttaactttattttaaagccgagtttaatacaatagatatattattttaaactgcatattcaaatttttctaagatttcttcaactgttaattgttctttttctttaccttttacatctaatacaacttcacccttatgaagcattatcaatctatcaccataatgaagagcgtgttttaagttgtgagtaaccataagtgtagttatatttttttcccttacaatcttattagtcaattcaattacttcatttgatgtttttgggtcaagtgctgctgtatgttcatcaagtaataaaactgatggacttgttaagcacgacataattagtgataatgattgtctttgacctcctgataaaaattttacttgaacatcaaggtatttttttaaatcaagagatacaccttccaataaattttctaagaaatctcttttgtaacgaagacattttcttagatttaatagttttcctttgttaagagctaaagacaagttttctctaacagtcatagaagggcaagttccaagacttgggtcttgaaaaactctacttactatttgagttcttctgtgttcagctaaattagacaagttatgtttatttaataatacttgaccagaagattcttttataagcccggatattatatttaataaagtagatttaccagttccattactacctatgatacttacaaattcaccatcttctatatcgattgataaattttcaaagatagtattaggttcaccatatggattagggaaactctttgaaagatttttaatttgtaacatctacaacacctcttttttctgatttatttttggtactagctttgcatttgttttttttagtgaaatatttaagttaccagtagctaggaaagctattataactatggcagttattagttttaagtcagttgataacattcctaaactcattgcaaagtatatagtgaattggtatataaaagagccaacaattattgcagtagtatctttgataaaagtaaatttcttaaatagtgtaataccaattatgatagaggcaattccaagaactaaagttcctatacccatatttacatctgagaatcccaagaactgagccataagactaccagataaagctataagtccgtttgaaatcataagtcctagtatttttatagaacctatatttatacccagagatttaatcatttgagagttatcaccaacaccttttaaagtgtatccaagacctgtttttaggaataaatctaaaaggactttacagatgaatacaaaagctaaggctaaaactataggagatatttccccattgaataagtgtttaaagctaaatagaggaatatttgattttcccattattcttaaattgatagagtatagcattcccataactaaaataccagaaagtaagttagatatcttaaacttaatgtgaagaatccctgtaacaagaccagcagtacaaccacataagatagccattaaagttgctactacaggagaaataccattagtaagagaaaatgctacaatagaagcacccattgtatagctaccatcagcagacatgtctggaaaatctaggattttgtaagttatataaacccccagtgccataatcgataaaattaaactttgcgtcattacagatataatacctgacataaataaaacactcctttgaaaatatttttataattttaattatttgctaattttgtgtataaaaaaaccacatagtgtacaaaactatgtggtaaaaacacgaataagccacatagtttaatctatgtggctcttatatagttaaatgaaaactttataaacaatatagccaacatagatacaatcccaaaattttaatagtcttaaggggtctgtatctatgttaaaacgtaggtacaaaccctaaaaatagtggctataataataataatattttctattgtttaataaagtattcataattatctctcccttttaatattttaattagtcagaaaattatatgtattctcgacttgttataaattataaattatacaataataaaagtcaactgctaaatttaattaaaatactaaataatgtatactcagaatacttttaaattaatgtattgtttgcaaaaaacgttatcctaagttataagtgaatgtggaaattttatcaaaatatttactaaatatggaataactagacatgtatatcaatcaaatatcataaaaaaaagctgtctggagaatattaaaattcttttggacagctcaagtagtgattagaaagttatataactttcataatcagtcgtcaatatagacgacttttatggaaaatgaataactttatatgcaatattcaaattgctacaataagcacaattttcaaagggttagggtggataagagtacttattatataaagttttcatattacctacttcatattacctattttttgaaattaataagttttattttgcagattttgcattttcatctgactttatatactttatattatctgctgataacttttgcatgtcaagtgcttttagtgtatcttcgttaattattatttcagtttcatctaatgtagtaactggtatatcgccaacagattttccttctaatacttcaatagcaagttctccagccttataacctagtttttcataatctattccacaacaagctaaagcaccagaagatacagaaccttcttcagaggctattataggaatcttgttttcattagcaactttagaaactattggcatagaagaaactattaaattgtcagtagggacatataaaacatctattttgccaactaaactagaaatagcttggttaacttcacttgaagtgctgattcctttttcaactacttcataattatttttcttagcataatcatgtagagaatcaacctggatttttgaattaacttcactagtattgtatataacccctattttctttgcttttggagtcaatgttttaaccaattctaatgttttatcaattgaaagataatcagatgtaccagaaacatttccacctggtttttcaagagatttaacaagtccagcttctacagggtctgtaacagcagtcattattattggaatatctttagtagcattataagctgcttgtgcagatggagtagatatagcatatatcaaatcttttttgtcggatacaaacttactagcaatactttgtgtagtaggcatatcattttgtgcattttggaaatctatttttatattatctccatctttatagcctttatcttcgagtgctttgatgaatcctttctttgctttatccagagacggatgttccactaattgactaatacctatatttttttgttttttgctatctgtttttttattttcatttgaagcattggagccatcattttgagaacatccagtaagcattgatacaccaagtactcctgctataattaaacttaatatttttttactttttatcattttattttcctcccttaaaatttaataattatatttgttcatatattcatatgatagattataaatatttctgattaaaactaagattttaatttcttatactgcatattcaaatttttctaagatttcttcaactgttaaattttctttttctttatcttttacatctaatacaacttcacccttatgaagcattatcaacctatctccatattgaagagcgtgtttcaagttgtgagtaaccataagtgtagttatatttttttctcttacgattttatctgttaactctattacttcatttgatgtttttgggtcaagtgctgctgtatgttcgtctagtaataagaccttaggacttgctaagctagacataattagtgatagtgattgtctttgacctcctgaaagatattgtactttaatatctaaatatttttttaagtccaaagaaattccttcaagtaagtgttccaaattattcgttttatgacgaagacatttttttaagttcaataatttccctttattaagtgctagagataaattttctctaaccgtcatagaaggacaagttccaaggcttgggtcttgaaaaactctacttactatttgagttcttttatactcagctaaatttgttatagtagtactatctaaagtaatttgaccagaagattcttttataagcccagatattatatttaataaagtagatttaccagttccattactacctatgatacttacaaattcaccatcttctatatcgattgataaattttcaaagatagtattaggttcaccatatggattagggaaactctttgaaagatttttaatttgtaacatctacaacacctcttttttctgatttatttttggtactagctttgcatttgttttttttagtgaaatatttaagttaccagtagctaggaaagctattataactatggcagttattagttttaagtcagttgataacattcctaaactcattgcaaagtatatagtgaattggtatataaaagagccaacaattattgcagtagtatctttgataaaagtaaatttcttaaatagtgtaataccaattatgatagaggcaattccaagaactaaagttcctatacccatatttacatctgagaatcccaagaactgagccataagactaccagataaagctataagtccgtttgaaatcataagtcctagtatttttatagaacctatatttatacccagagatttaatcatttgagagttatcaccaacaccttttaaagtgtatccaagacctgtttttaggaataaatctaaaaggactttacagatgaatacaaaagctaaggctaaaactataggagatatttccccattgaataagtgtttaaagctaaatagaggaatatttgattttcccattattcttaaattgatagagtatagcattcccataactaaaataccagaaagtaagttagatatcttaaacttaatgtgaagaatccctgtaacaagaccagcagtacaaccacataagatagccattaaagttgctactacaggagaaataccattagtaagagaaaatgctacaatagaagcacccattgtatagctaccatcagcagacatgtctggaaaatctaggattttgtaagttatataaactcccagtgccataatcgataaaattaaactttgcgtcattacagatataatacctgacataaataaaacacccctttgaaaatattttaaatggttttttaaatttggttttaaaaaatgattttgatataaaaaaaccacacagtatatataactgtatggcaaaaattcgaataagccacacagtataatccatgtggctctatattatgatgataaaataaaaactttaacaacaattactatagccaacatagatacaatccttaaaaatcataatcctaaggggcttgtatctatgttatgacaatttgtcttaacttaggtacaaaccctaactaaattggctactaaaaaatcgtacttgtttgtttaataaagtcttcatatttacctctccttttaatttaataattttgaaaattttgttttctgttttgtatagtaattagtttaatacagtaaaaaataaaagtcaactataaattttgaaaaattatcaagttatcagaaaattgagtttaaataaaaaaatttttacatgtagaatatagttatattcttaattattgtttttttataaaaatgaaaaatataaataagtcataaaagattataaaaataaagagatatttagataattagtgtaaataggttttaaatcaacataataacttaaattatatggtataataaattaaataattgttttaattcaaaattttttgttattttaaattatttcaaaactcttagttttagtgattttatttatgatatttatgggattaaaagatttcaatagatatttttggtaagtatttaagaagtctttaactttataggagtgataatttatgctaataggtacatctaaattaagcagaaatgttgatactgcatgtgtagaagaagtagggattccaatgattgtattgatggaaaatgcggttatatctgcaatgaaaaatatggatatagacatgtataatagttatacagttgtatgtggtgttggaaataatggaggagatggtcttggaatagcaagacatctaaatacatatggaaaagaagtaaacgtatttttagtaggtaatcttgaaaaactaagtgaatgctctaaaataaattacaatgtacttttaaatatgggaattaatattataaatattaataaaaatgatttaagtgaaaaaaattatggagatgaaaatgaagtagataaaattattaaagttgagaaacaaaatattataaaaaataaaaatttaacaatttttaaagatagagtatctaaaagtgatgttgtagtagatgctatatttgggactggattaaaacgtgatataactggtatttttaaagaagttattgacatagtaaacgataatagcaaaaatacatattctatagatattccttcaggtatagatagcgataatggaaatgtattaggaacttgtattagagcaaacaaaacgattagctttgagttttataaaagaggttttctaaactatgacactagcacacttataggtgatgtagttgtagaaaagataggtgttccagattttattacaagaaaataccatgatgaagagttcataactgataagacttttgtaaaaaataatattagaagaagagataagcatggttttaaaagtgattttggaaaagtatctatagttgcaggttcaaaaggattttatggtgcaagtttcatagcaactgaatctgctgttaagagtgggagtggacttgtaacattaattagtagtgaagatgtgcaagaaaaggtatctattagacttacagaagcaatgactttaaattttgaagaagaaagattaaataaattacttaattctagtgatgcaattggttttggtccaggtatgggagataatagtcaaacatttgataaattacttaagatagtagaaaattctaattgcccaatagtattagatgcagatggattgaacgttatgaaggacagatgttataagtttttagaatggaaaaatagatttgtaattacacctcatttgggagaaatggccaggttgacaggagattcaattgggtatataagagaacatagagtagatgttgcaaaagaatttgctcaaaaatataatctggtggtgcttttaaaaggttatcaaactgtcataacagatggtaaaaaaacatatataaatcctacaggaaatagctgtatggcaactggtggaatgggtgattgtttgcttggaatgattacttcatttataggtcaaggtatggatatattggaagctacagttagtggagcatatatacatggctatataggagataaattgagcaaagcaatgtatacggtaaatgctacggatttaataagtaacatttcattaacaatgaaagagttgttggatatataattgattaaaaaatagctacgcacacttgtgactttagtcatgagttagtagctaaaatagtcagcatatagggaaacctatatgtagagataggatagaacctatccaatactacttgaattgctaaaatcccctaaagctaactaaactaaaacataaggatgaaataaacctaagtgtgaaagttacgaaagtagaaaaaattggttagatggtataaggttaaatcctaagtactttaaaatgggcaatcagcaggtaagctccgaataggagaaacttcaacgactattcctcttgagggaagtacactacaagttatcggtagtggaagtggatagaccttagcggataatgccgaaggataagatatagtctgtgcttacatgaaagtgtaagaagttcataagagaactgcataggtagtagcgaacttatgtgaacgacaacctcaaaaatgataaaagttaagacttacggttcttaaatatgttatttaaaaataaatataaaaaaccttcaaaatacttgttttaagtaattgcatattttaatattatgataggtgatgaaaaatggaagttactcatggtagaggatatgcatataatatgtcaaatatagacatccagtattatggggagacatctttggaatcctagttatttcgttgccactgtatcagaaaatacagaggagcagataagaaaatatattaataatcagaaaaagcaagtaaagtgaggtggcagtagtggaaaaagcttataagtttagaatgtatccaaataaaaaacagcaagagttaattaacaaaacttttggatgttgtagatttgtatataataagtatcttgctaaaagaatagaagtttataaaaacgataaagaaacttttacttataaacagtgtagttctgatttgaccaatttaaaaaaagaattaaagtggcttaaagaacctgacaaattttcactacaaaacgccttaaaagatttagataatgcatataaaaaattttttaaagaaaaagcaggatttcctaaatttaaatcaaagaaaattaatagattttcatataaaactaattttacaaatggaaacattatgtattgtggtcaacatataaaactacctaaacttggtatggttaaggtaagggataaacaaatacctcaagggagaatacttaatgctactatatctaaagagccaagtggtagatattatgtatcattatgctgtactgatgtagatattgaagtatttgaaaatactaacaatcagataggtttagatttaggaattaaagaattttgtatctcaagttgtggagaatttatagaaaatcctaagtatcttaagaagtcattaaacaaacttgctaaattacaaagagaattatcgagaaaaacaatcggtagtttaaatagaaataaagcaagattaaaagttgcaagacttcaagaacatatagctaatcaaagaaatgattttctacaaaaactatctactaaattaataaaagagaacgatattatttgcatagaagatttacaagtaaagaatatgattagaaatcgtaaactatctcgcttaatttctgatgtgtcatggtcagaatttgttcgtcaattagaatacaaggctaattggcatggtagacaaattgtaaaggtaggtaaattctttgcaagttcacaaatatgcaataaatgtgggtataaaaacgaggaagtgaaggacttaaatataagagaatggatttgtcctagttgtaatgaaattcacgatagagatataaatgcaagtataaatatattaaaagaaggattaagactaataacgattcaaaataaataacttatgtaagaaccgtaggaactacggggatagcctgtggagaattagtaagacatatgttagtatgcaaaattctatgaagcaggaaccctgtgactttagtcatgggaggttcagactactttgtaacaattttaacaaagtatgttgatataatactattaaattaatcttagattagtttattctattgatttgtagtttaaatttatattcaaaaacattgtataaacatataatttatatagggttttataattcatatgaaaagagggtagatagtatgaagttaatatggttgatagtagcagtcttatttggaatagcagaaatgttaacaccaagcttaacattgatatggtttagtgtaggagctgtaatacttatatttttaagtagctttatagagagtattttcttacaaattttaatatttgcagtaatttctatagcaatgttagtcgtagctactaaaaaaatagtaaaaaaagataaaggctataaatctaacactaatttacaagcaatgatgtctaaaaaaggtattgttacagaagagatttctccaaataacacaggtctagttgtagttgaacatgaaacatggacggctatttctatagatggtgaaaagatagaaaaaggttctacagtagaagtattaaaaattgaaggggtaaaattagttgttaaaaaagtagacgccacagttaatgtgacaaaccaatagaataaaggaggatttatagtatgggtactaaaattgttttaagtattgtattaatagtagtagtcgtagcaataagtttaacgtgtataagagttataaaacaatctaaagtaggtataataatgagacttggtaagtttcaaaaagtggctgaaacaggtgtacatttcttaataccatttttagataaaatggcatatgtaattgaccttagagaaattgtaatagattttccacctcaaccagttataactaaagataatgtaactatgcagattgatacagttgtatattataaagttacagatccagttagatatgtgtttgagatagctaatccaatagctgctattgaaaatttaacagctacaacactaagaaatataattggtgaacttgatttagatgaaacattaacatcaagagatataataaatgtaaaaatgagaactatccttgatgaagcaacagataaatggggtataaaagtaaatagagtagagttaaaaaatataatgcctcctcaggatattcaagttgcgatggaaaaacaaatgagagcagaaagagaaagaagagaggcaatacttcaagcagaaggtaataagtcagctgcaatacttcaagcagaaggtgaaaaacaatctgcgatattaacagcagaagccaaaaaagaagctatggtacgtgtagcagaaggtgaaaaagaatctgctatattagtggcagaaggtgaagctgaagctataagacagaccgctattgctaaggcacaaggtgaggctgaaatgataaaaagaactcaaatggcaacagcagaaggtttaaaattagttttttcagcaatgaaagaggctgatatagacaataatattctagcattaaaatctatggaagctcttgaaaaaatggctgaaggtaagtcaacaaaactggttttaccttcagaagcagttaatttcctaggaacattcaaaggaataaaggaagttatgagtgatgataacaaagaagtacttgatataaaagaagttttaaatgataatgaatcattaaaaaaataaaagagttttgttatcataggaaggatatggaaattaaaggtcgaattaattaaatatagcacaaaaatgcacgttgaaaagaagaggacttataaatttttaagtcttcttctttgtttttattagaaagatgaaattataaaaatgaattaacagaatctttatacaatttatcctttactaatgtaaaaagtgttatataatattatataaaacatatagcaaataagcatggttttagttagtctatttatattattaatatatatttataaaaatataaacattaatactaagaaaactaataaataatttaaaagtttatatccttttgtttaaattatagacaaagaagtatcaattaaaaaataaagttgattaataattacttgattttctttggataattatttaacaaatattagattatattttgctattacgaatttaacaaattaaaaaataagcatgtttatatgacacaagggatttataaaaaatgtttttatatttataaaataaaatttgtattattttttaaccgataattgaatattaataaatactatagtgcttatggaaaataatgtatacgtcggtaagttcattatggggtatacattatatcaattgtatagttgatattattttatttttattaaggtattatttaagcaacatttatacacggcatttattgactgataaagtttataaaagtaaaaatgcaattataaatattaattactagatgaggggagtgtcattaaatgaaaaaagagatgttagctatgattttggcaggagggcaaggttcaagattaggtgtttttacaaaaagaattgccaaaccagctgtatcatttggaggtaagtatagaattatagattttgtgttaagtaattgttcaaactctggtattgatactgtaggtgttttaactcaatatagaccgttgatattaaattcacatataggcatgggaagtcattgggatttggacagaataaatggtggtgtctatgttttacaaccatttatgaatgaaaaagaaggaaattggtataatggtacagcacatgcgatatatcaaaatatggactttgtagatacctataatccagaatatgtattgatattatctggtgaccatatatacaagatggattatagcaaaatgttaaaatttcataaggaaaaacgctctaaagctacaatagcagtgattgaagttccttgggatgaagcttcaagatttgggataatgaatacaaatgaagattcaagtatctatgaatttgaagaaaaaccaagtgaacctaagagcaatttggcatctatgggagtatacatatttgattggaaaatgttgagaaattattttaaggaagcagaaaaaaatccagaaataaattatgatgattttggaaaaaatttaatacctaaaatgttagaagataatgttggaatgtatgcttatccatttaaaggatactggagagatgtaggaactatacaaagtctatgggatgctaatatggatataataaaatctccagaaacacttgatttagcagaccctaaatggaagatatatacaaatactatggcaatgcctccacaatatataggtaaaaatgcaaatgttcatagatcaatgatagctgatggttgtagaattttaggtgaagtaggcaactctgtattatcacatggagttgttgttggtaaaggaagtaaagtaattgattcagtaataatgccaaatgttgtaataggtgaaaatgtaactatagaaaaagctatgataggtgagtgtgcaactataaatgataatgttcagataaagaatgtaaataatgaaataaatgtagtttctgagtatgaaaatatcgaacctagatgcgtattaatagaaggaggtctttaagatgagaaatgaatgtttagggataataaatttaaacaaaaaaggagacccagcaataaacaaacttaactatggaagaccaatagcatctacaccaatagctggaagatatagaataatagactttgctttatctaatatgataaattcaggaatcactaaagttggaatattcgcaaaagaaaaatacagatcattgacagaccatataggtagtggtaaagattgggatttaagtagaaaaaaaggtggcctatcaatttttagtccagaaaacactaagtatagaaatacttactcacatagagaaggtgatatatatactatcttagctaatctagattatatagaaaagagtgaagaagaatatattttaatagctccaagctatatgctatgcaatttaaattattctcaagcattggaataccataaaaaatctcataatgatataactataatatataaaaatgtaaataatgcaaataaagattttgctggtaacttaacactaaatttagatagtaacaatagggtaataaatgtaggaaataatttaggcaaattccctagagcaaacatatgtatggagacatatattatgaagcgtgaagattttgttgaatgtatatataacattgtaaataaaggcagttattgttatttagaagaatttattattgaagaagcagaaaatatgaaaataggagcttatgaatatacaggatatctaaaatgtgtaaattctgttgaatcatattttgaaatgagcaaagatttattaaatttagaagttgcagatgaattattatactctgaaagaaagatatttacaaaagaaaagaatgaatcacctacaatttatacagatagtgctaaagtagaaaatagctttatagcatctggttgtttaatagaaggtactgtaaaagatagtatcatatttagaaaggtaaatgttgaaaaaggaacagttatagagaactcaatagtaatgcaaaattgtgtaataaagtcaaatgcaaaactatataatgcaatattagataaaaatacgagtgtatcaaatgggaaagaattaagaggagatgaaaaatatcctcttgtagtggaaaagaatacaaatatataaataaattttttagaagggggaatgactaatgaaggttttttatgtaacagcagagtgttggccctttgcaaaaactggaggattaggagatgtttcttatgcattgcctaaagaattaaaaaaagaaggtgtagatgtaagggtaataatgcccaaatattcaactataccaagttatttaaaagatcaactaaaagaaatagctgtgtttagtgtacgtgttggatggagaaatcaatactgtggtcttttagaaatggaattggatggtgtaaaattttactttatagataatgaattttattttagaagagaagatgaaagaaagagtatctatggatatggagatgatgcagaaagatatactttctttacagatgcagttttagaagctataagtagaattgatttttatccagatgtaatacatataaatgattggcatacagggatgttaccattaattctaaaagaaagatatgcaacccttgaggggtataaaaatataaaaactatgtatactatacataatctccaatatcaaggtgtatttgataagcatgttttatatgatatattggacttaccacaaaaatactttgataatagagatatagagtattatggctcaataaattttatgaaagctggtataaattttgcagataaaattataactgttagtcctacttatgcaaatgaaatacaaacatctttttatggtgaacaattagatggattacttagaaaagagtcaggaaaattaaaaggtatattaaatggtatagattatgatttaaacgaccctgcaaaagataaagatatatttgttcattatgatgtagactcaattgacaaaaaagtagaaaataaattgagattacaagatatattgggacttaaaaaagattcatctattccgttgataggtatagtttcgagattagtttctcaaaaaggatttgatttaatagcatacatgatgccagaacttatgagagaagatttacagattgtcgttttaggaactggagaacatcaatatcaatcaatgttcaactattacgattctaatttttcagataaagtatcagctagaattacttttaatgcatcattggctcaacagatatatgctgcaagtgatatgttcttaatgccatcattatttgagccttgtggtataggtcaaatgttagctatgagatatggttctttaccaatagttagagagactggagggcttagagatacagtaacaccttataataaatttactggagaaggcaatggatttagttttaaaaattacaatgctcatgagatgtttttctgtttgaaaaatgcaatcaaagtatttaaggacaaagaaaaatggattaaattagttgaaaatgcaatgaaaacagataatagttggaaaaaatcagctaaggagtatatagaaacatatagagacatatgtgattaaaggagtggtttttttggtaacaataagcaaaaagaaattcaagcaaaaatttgaagtaaaaatgtatagcttatatgcacaatctatcaaggaagctactgatgaacaattgttaaatgtattatgtagtctattgaaagatgagatagcaaaaaaatgggttgctacaaagttagataagaaaaaagaagtttattattttagtttagaatttttaatagggagacagttaaaatctaatttattaaatttaaatattgaagaagaagttagagaaggtttatctgaattaggaatcaacttggatgatttaattgaagctgaagtagacccagccttaggaaatggtggacttggtagattagcagcttgctttttagattctatggcatctttgaacataagtggtcaaggatatggaataaggtataaatatggtctgtttgaacaaaaatttgtaaatggttatcaggtagaagtgcctgataactggcttacagaaggacgatatgcatgggaaactgtaagaccaaatgaagcaacaatggtgaagtttggtggtgaggtagaattaatcaaggaaggtagtcatttaaaagtaattcataaaaactaccttcctgtaatggcaatgccttatgatataccaataatcggataccaaaaccaatgtataaatactttaagattgtttaagagtgaaataccaaagagagattttggtgaacttacctcaaatgctctaaattattctggtagctatgaagaggctttaaaacataagtattatactgaggaaatatcacaggtattatatcctgatgattcaaactatgcaggtaagttgttgaggttgaaacaagaatacttttttgtaagtgcagggatacaagatataataagaaaatataaaaagaacaaattaaatattgataatttattcgataaggtagcaattcatataaatgatacacatcctaccttatgcataccagaacttatgagaattttgcttgatgaagaaaatttatcttgggatgaagcatgggaaataactaaaaaaacagtgtcctatactaatcatactataatgtcagaagcaatggaaaaatggcctgtaagtatgatgaaagaactattaccaagaatttatatgataatagaagaaataaatagaagatatgtagaggaattaaataataaaggatatgagcaggatagaataaaaagaatgagtataatagactgtgacaatatcaatatggcaaacttatgtattgtcacaagtcatagtgtaaatggagttgctaagcttcatactcatattcttgaaacagaggtattaaaagatttctatcaagatgaaccaaataaatttaataataagactaatggaattgcacataggcgatggcttataagttcaaatcctcaacttagcaatttaattacagatttaattggtgattcatggaagaaggataccttacaattaaaaaatattgaaaaatttaaaaatgattcctctgttttacaaagacttgatgatataaaatacaataataaagcaaatctagcaaagtttataaaagataaatacgatttaaatgtagacccaagttcgatatttgatgttcaagttaagagattgcatgcgtataaaagacagttactgaatatatttaatgtacttcatatgtatcatgaattacttgataatcctaatttgaatcttgacccaagaacttttatatttggtgcaaaagcagcaccaggatattatttggctaaatgtataattaaatttataaattctgttgcaagtactataaataatgatgttagagtaaaggacaagttaaaagtagtatttttagagaattatggagtatcattagcagaaataataataccagcagcaaatgttagtgagcaaatttcaactacaactaaggaagcatctggaacaagtaatatgaagtttatgatgaatggtgctataactttggctacacttgacggcgcaaatgtagagatatgtgaacaggttggtaaagaaaatatgtttttatttggacttagtgcagaacaagtactaaattataataaatatggtggatattcttcacttgacttatatcattctaatatggatataaaaagggtggtagatgatttaataaatggatttattcctaatcttggcgaagaaggaagaagtatttataattcactcactacttacaatgatgagtattttgtattgagagattttgaaaattatggtcaagctcaagcagatataaacaggttatatagagataaagaaaaatggaataaaatgtctttagttaatatagctaactctggatttttttcttctgatagaacaatttctgagtatgcaaaagacatttggtttaaaagggtgtgattaaatgcaaagtgtaatagaatataactcttgggataaaaattttaaggctccgtttggagctttaaaatttgatgaggaattgaccatttgtgttaaagtaaatgagggatacaatatcaagtctatttccctagaaataaatagagaagaagaaatgagaacaataactttaaatgaagaattagataatgataaacttggaaagtgcttttgtggtaagattgaaaagtttgatggtacaggtgtttatttttattactttaaagttgatgttgaaatggatggtcagataaagactttattttatggaaaaaacagagataatggatattcttgtgaatataattatagtgatattaataaatatcaaatcactgtttacaaagattttaaagtaccaacatggtacaaagaaggaatactttatcatatatttgtagatagattcaataatggaaatcgtagtggtaaggttgataatcctaaaaaaaatagtttcatatatggaaattgggaagatatacctatgtacataaaggatagtcaaggggatgttataagatgggatttccatggtggaaatttaagagggataatcaataaacttggatatttaaaaaaattaggtgtaagtatactatatctaagccctatatttgaagcttctagtaatcataaatatgacacaggtgactataaaaaaattgacccaatgtttggggatgaagatacatttaaagaacttattgataaagcaaaagaaaaaggtatatcaatagtattagatggagtttttagtcatactggagcagatagtaaatattttaatatgtatggaaactataatagtttaggggcatatcaatctaaagaatctccatattattcatggtatatgtttgaagaatttcctcaaaagtataaaagttggtgggatgttaagacattgccaaatataaatgaattagaacatagctatatggattatataatatatgacaatgatagcgttataaataaatgggtaaatatgggtattaagggctggagactagatgttgcagacgaattaccaactaagtttataagagagttaaaaaaggaattaaaaaaggcagatgatgactcaattcttataggtgaagtatgggaagatgcatcaaataagattagctatggtcagagaagaagttatttattaggtgaagaattagattctgttatgggttatccttttagaaataacatgttttctttcttaaaaggagaaattaattcatatgaactttgtaatagatatatgcagattaaagaaaattatccaaaagaatcatttaggtctaatttaaatttaattggaacacatgatgttacaagagctaaaacggaattaaatgatgatgtagatttagtgaagcttgctgtagctatacagatgacatttgaaggagtaccatatatatattatggagatgaagcaggtctttgtggaggtgttgacccagataatagaagaacttatccatggaaaaatgaagacgaagatatgcttaatttttatagagatgttataaaaattagaaataagaataaacttttaagttctggaaatacagaatttatatatactaataatgattctgtattttcttttattagagttgatgaaaataatgatagaatgttaattttagtaaatagaagtgaaaatgtggaaagtatatcattatgtatagagagtagttttattgaggaaatacctataaagtatagtcttaaaaatgcaaatagtactatacaaattgaaaataatgagttgaaagtagatttagactctaaatcatttagaatttttagagtaaattaaatatctttttttagaaaaataaatagaaaataaggtgaatgtagaaagagttttgttttatcaaaactttttctactttttttgtataaattatcataagaattttagtgtttcaaaatattacaaagaagtataaaaaatatcataattgtgatattatataaattagtaagataaaactgaactctctaccaaagttgtagggagatttaacttttataatcttaatatggaggaacgtcttatgaaggtagatccacttacaactcaagtatatgactatatatcaaagaaaatccaaaatggagagtatgaagctaatcagagaattactgaatctgagatttgtaaatctatcggagttagtagaacaccagctagagaagcattaactaggttagcaggtgaaaatttactagaaaaaatacctaataagggatttgtagtaaaagaatttcaggaaaaggagaaattagacacctattccgtaattggagtattggatgcgttagccggttcttcagcattacaaaatttaactgaatcagacctagtaaaaatggaagaattaacagaaatgatggcggtctctataaagtataaaaattacaatagctatttaaaattaagtaatgaatttcacgatatatacataactaaatcagataatcaggtgttagtaaatctattgaactctttaagatataattttatgtcaaagtcatatactagtgataatgaagatgagttatataaaatgttgacatacagcaataatcaacatattgaagtagtaaaatttatgagggagaatgatttagaaaatgttgaaagagttttgagagaacattggaaaacgatacctatagcagagatgaaaaaagagaagcttttataaagtttctctttattttttttataattttgttattttactattaaatattaaaggaaaaacaagaataaatttaactttaaatacaaataaaaactctaaggcactacgatagaataatatatttaaattaacatatataaatcaatgaacttatagaattttaatatcataaatatagaatttattttatcaattaaaaaatttaataaattttatattaaaattaaaatacaaaaataggaaaattatttagtccaactaaaccaagaattttgatatatgaaataagaataatataaaagtttagtaataaaatacttataaattaaaaatagtaaactcaaaagcttactaaaactcaaaaaagtaaaaaaagcaaaataataaaaaataagaaagtttataaatactaagttttaaaaaaattaatataaacaacaaaaaaataaaaagtttataaatattgatatagctaatgtatatgtttttgagtaacttcaaaaaaacacttgtaaaaatgctggaatgttaatataataaatatcatgagtttaataaaagtaaaaataaaaaatagaaataataaataataaatattaaaaatatttgaatatagagaggagatgaatttgaaatcatggatagcgagtttgcaaatgcagttgaattaagctatgagtgtgctccattattagagtcgttaaaggaatactcagagaaagatatagcttgttttgatgttcctggacatgtaaaaaatagaggtgtagctatattaaataaatatctaggtgaaagtctcatgaaaatggatataaattcatcaccaactatggataatgtatctgcgccaaatgggattataaaaaatgcacaagatttgctagcacaagcatatatggctgatgaggcattctttataacgaatggcacaactcaagcaatacatgcaatgattttgagtgttataaaaccaggtgaaaaagtattacttccaagaaatatacataaatcagtaataaatgcgttaatactttgtggaggaataccaatatttatacaaccagaatttgatgaaaaactaggtataagtttaaatattactcttgaaaaagttagaacagagatagaaaaagattgtaatataaaagcattatttttccttaatccaacttactatggagtttgtgcagaccttgagagtattatagaactatgccataaaaataatgttttagtgttagttgatgaagctcatggtgcacattttccatttcatttagatttacctccttctgcaataagtttaggagctgacatggtagctgtaagtatacataaaactggaggagcattgacacaatcttcagcactcttattgaatagagataatgtaagttttgaaaaggttcttcaatcaatcaatatgctacaatcaacatcagcatcttatttgcttatggcaagtatagatggtgctagagttaatctagttgagaatggtgaaaagcaactgtcaaaagcattaaatctatctaggtatgcaaaatctaaattgaacaaaattgatggaataaaagttttatctacagaaatattgaaacaaaaaggtgttaaatttatagatgaaacaaaattgtgtataaatgtaaaagaattaaatttgactggatttgaagtatacgatttattatataaaaatttttcaattcaagtagaattgggagattcatataatatactggcacttgtgtccattggaacaaataaatcagatatagatagattagtaaaagcactttctataattgcaaagatttatagaaaagaatcaacattaaatgaatttaatatggttcaaataaatccaattattaaacttaatccaagagaagctttttatgcaccaaaggaaagtgtagaaatcaattcatgtatagatagaatttgtggagaatcaataatggcatatccaccaggtataccgattattgctccaggagaattgataacagaagaaattatggagtatattattttcttaaaaaatagcaatgcgtatcttacagatgtacaagataaaaacttagatagaatactagtaataaaataaattactttattttgcaagggcaagtgtttgttaagtagagtttatcaaatagaacttattaaaagtataaaggagttggggttgaaatgaaatttgaaacactaggaagacatatactagtagaatactataattgtgatgaaaacgtacttaaagacccacgtcttatagaaaattttatgaatgattcagcattaaatgcaaaagcgacaattgtggattctgtattccaccattttaatccttggggggtttcaggagctgttataattgctgaatctcatttgacaatacatacatggcctgaatatggttatgcagcagcagatttttttacttgtggtgatatagacccatggaaaagttttgaattattagagcaacttttaaagtctgaaagaagcgagtctacagaaattccaagaggcttaactacaaaaattaaaaaatattcaaaaaaagatttaggtaagattactcataaaccagaagcagtataaaacatacaagagaaagtgaggattattatatggaactttggtatacagaagaatggacagaaaatgtaagattttctataaaagtaaataaacatctatttgaaggaaagtctcaatttcaaaggatagatgtatttgatagtgatgaatttggaaaatttctaacaatagatggattaatgatggtaacatataaagatgaatttatataccatgagatgataactcatgttcctatggctacaaatttaaacataaagaaagtattagtcataggtggaggtgatggaggtacagtaagagaattaagccgttatcctcaaatagaaaagattgacatggttgaaatagataaaatggttgtagatgtatctaaggagtatatggatatatgctcatgtaaattagatgataaaagagtgagtttatattttgaagatggtgttaattttgttaagtgtgcacatgataaatcatatgacctgataatagtagattcaactgacccaataggaccaggcgaagggcttttctcaactgatttttataaggattgttatagaatactgactgatgatggaattttagtaaatcaaagtgaaagtccgtattttgactttaatgctaaagagatgaaaagagctaataaaaaattaaaacagatatttccaatatcagaagtttatcaagcacatataccaacatatccatctggtcactggttgtttggatttgcttcaaaaaaacttaatccagtaaaaaatcaagatagaaatggatgggagaaattaagtttaaaaactaaatattataatagtgatatacatttaggttcgtttatgttacctcaatacgtgaaggagatgctagatgaagaataatttctatcatatgaacacttttatgagtatggacaaaaattatgaagaatctaatcttatagtatttggtgttggatttgatggaactacttctaacagacctggggctagatttgcaagtagctctatgagaaaagaattttacggtcttgagacatatagtccttttttagatttggacttagaggattataatatatgtgattatggagatttagaaattagtgttggaagtacagaacaagtcttaaaagaaatctatcaagagacatataagattgttagagattcaaaggtaccctttatgattggaggagagcatttagttacattaccagcctttaaagcagtacatgaaaagtacaatgatatatatgtaattcattttgatgcccatactgatttgagggaagaatataataatagtaaaaattctcatgcaacagtaattaaaagaatatgggatattgtaggtgataataaaatatttcaatttggtataaggtctgggacaaaagaagaatttaaatttgctacagaagaaaaacacacatacatggaaataggaggaatagatacgtttgaaaatatagttaatatgctaaatggaaagaatatttatctaactatagatttagatgtattggatgcatctgtgtttccgggaacaggtacaccagaacctggtggtgtaaattatagagagtttcaagagatttttaagattataaaaaactctaatataaatatagttggttgtgatattgtagagttaagccctgattacgatacaacaggtgtatcgacagttatagcttgtaaaatcttaagagagttatgcttaataatatctgataaaattaaatagagtattttatataaatagtatatattataatataagaagttattttaaaaaagttagtttaagtttgacgcttttctaaagtaacttcttatttttgtaattaaaaataaatataataaacaacaaaaaagagccctcgatagctccttttctaaaatatatatatttaaattaaataattatattctatttacgttttcagcttgaggtcctctattaccttgagttatatcaaagctaaccttttcgccttcttctaaagttttgtatccatcattttgtatagctgagaaatgtacgaaaacatcatcttctccctctacagatatgaacccaaatcctttttcattgttaaaccattttactattccgtttttcattataagaaaacctccgcattattaaaaaatacaaactaaaaaaataagtctgttctattaatataacataaattttaaataaaagcaaataaaatttttaaaaaaattaattacttttagaatttaataaaaattgttaaattatacagtgagaagtattgtaaaatttgacgaaaatgtaaatgtagataataaatttaatgtcaaaaaatgcaacaaaaaggtatgtaagtaaaaagtaaaattaaaatatataataaaaaatattatatattagattaaaaagtaaaaataaaaatagtgaaatttcagaaatatcaataatattatataataaaataaaaaaacactatatatattcgataaaataaaatttaaacatataatattttatgtatatattaataaaaggacatattgtgttataatggtatcgtataaaatcatttacgggggtggtattaaaatgtttcaatttgaaacacaaatacacaaattaagacatgatgttttaactgcaatagctagacttggaaaagaagataaccttaccagagaagcaatggataatattcagtatgaaataataaaaggtgagaaacctacatacagatgttgtgtttataaagaaagagctataatatctgagagagtaaatgtaagtatggggttacaaccaggtcaagataagatagatttagatacaatggatatagaagaagatgaacaaattatatatattttggaagctgcatgtgacagttgtccaataaatgaatttacagtaacagatatttgtagaggatgtctagcacatagatgtaaagaagcttgtaaatttggagctataacacatgtcggaggaatggcctatataaatcatgaattatgtaaggcttgtggaatgtgtaaaaaagcttgtcaatatgatgccatctcagaggttgttagaccatgtaagagtgtttgtccaactaatgccttaggatttgatagagaaaatatgaaagctatgatacatgaggataaatgtttaaactgtggagcatgtatgtcagcatgtccatttggagcaatatctgataagagtttgatagctcctgtagctagaaagttggttcaaaaagagaaaatgtatgcggtagtagctccagctataacaggtcaagttgaagcaaatgttacatatggtcaaataaaaaatgctataaaatcactaggatttgttgatgtattagaagcagcttgtggagcagatgcagttacagttcatgaaagcttagaatttgctgaaagaatggaaaagggagaggcttttatgacaaattcttgttgtccaggatttgttggttatatagaaaaaacatacccaaatcatgtaggaaaaatatcttctacagtgtctcctatgatagctagtggtagatttataaaaagtcatgaaccagatgctaaagttgtattcataggaccatgtacagccaaaaagagtgaggcagctaagaaagaattaaaaggagctgttgattatgtacttacttttgaagaaataatggcattatttgaggcatttgatatagacttggctaagtgttcaaatgaagatatagatgatgcatcaatttttggaagaggttttggagctgctggtggtcttacaaaagctatagaaaattatcttgctgaaaaaggtattggtgttaattttgaacctgtaaagatttctggttcaagagaaatcaagaaaactatgactatggctaatttaggaaagctagaaggtaattttatagaaggaatgatgtgtgaaggtggttgtataaatggttctggtaaattcttatcaggtgcaaaggttaaagccacttttgatagaaaaaattctcaatcaactaagaaaagtgtcttagcaaatacaaagataaaagattttagtaatataaatttagaaaaataaagataatacaaagcaacaaaaatacatattgttaatagagttgttctaagttgaggtttaacttttggacaactctatttttatttatatatttaattaatgaacaactaaaataaaaattacatatataatattttgtatataacttaacaaagtatatgcctatgttataataatttatagaaataaataaaaaatacaatatacataatagtagaaatatagtaaaaaggtgtgatttatagggaggattacttatgtttgaatttgaaacgcaactaaaaaggttgaaacatgaagttttaacagcagtagcaagactatctattgaagaaaatttaacaaaagaaaatatagaaaaaattccatatgaaataattaaaggagaaaaggcgagatatagatgttgtgtttataaagagagagaagtagttcttgaaagggcgcaacttgcattaagtttaactccaaatagtaaatatggagatataaatccagattcagttagtttggacacagatgagcaaattatatatatagttgaagcagcatgtgatagatgtccaataaatgaatttacagttacagagctttgtagagggtgtttggctcatagatgtaaggaagcatgtaaatttggggcaatttcttatataaatgggagagcatatataaatcatgatttatgtaaggcttgtggaatgtgcaaaagttcatgtcaatatgatgctatatcagaagttgtaagaccttgtaaaagcgtttgtccaacaggagctttggattttaatagaaacactatgaaagcaatgatacatgaagataattgtataaattgtggagcatgtatatcagcatgtccttttggagcaatatctgataagagtttgatagcacctgttgcaaaaaaacttgcaaagaaagaaaatatgtatgcaatagtagctccagctataacaggtcaaatagatagtaatattacatatggtcagttaaaaaatgctataaaatcacttggatttgtagatatgatagaagcttcttgtggagcagatgcagttacagttcatgaaagcaatgagcttattgaaagaataaaatcaggagataattacatgacaaattcatgttgtccgggattttttaagtatatagagaagatgttcccagatgaaaaagatagaatatcatctacagtgtctcctatggtagcaacaggaagattagtaaaaaaaatagattctgatgctaaagttgtatttatagggccatgtacagctaaaaagagtgaggcaacagagaaaagtttaaaagattcagtagattatgtacttacttttgaagaactaatggcattatttgaagcatttaatatagatttatcaaaatgttcaaatgaagatataaatgatggttcgatttttggaaggggatttggagcgtctggtggacttgccaaatcagtacagaactatattgctgaaaagggacttagttttgagtttgaacctataaaagtatctggtccaagacaaattaaaaagacaatgacaatggctaaattgggaagattagaaggtaattttatagaaggaatgatgtgtgaagaaggttgtattaatggagcaggtaagtttttatcaggtgtaaaagctaaaaatacttttgatagaaaaaatggacaatctactaaaaagagtgttttatctaatgataagattaaagaatttgaagatgtaaatttagaaagataattgttttggtacagtcatttttttatcatgccacaaatatgcctaaaattttccctttttatatgtgtattttacagagttaaggttgctatactataaatatgtaataaataaaatttataggagcttttggatgaagaaaatagtattaaaagatatcctgtttttagttactacattatctataatagtaatattattgtttgtaacaaatataactactaatagtaagataaaatcaacaagtgaatcttatttaaaaagtgacaaaaatagtgtgaggcaaaatggtatccagaggagcacaaaaaatactgcatttaagactactatattaagtactggaaagtctgactgtatattaatcgagataggtgataaattcataatgattgatacaggagaagataaaaatggagaacaaatagttgataaattaaaagaaaaagaaataaatgcacttgactatttgattaaaaaatagctacgcacactcgtgcctttagtcatgagttagtagctaaaatagtcagcatatagggaaacctatatgtagagataggatagaacctatccaatactacttgaattgctggaaacccctaaagctaaccaaactaaaacataaggatgaaataaacctaagtgtgaaagttacgaaagtagaaaaaattggttagatggtataaggttaaaccctaagtactttaaaatgggcaatcagcaggtaaactccgaataggagaaacttcaacgactattcctcttgagggaagtacactacaagttatcggtagtggaagtgggtagaccttaacggataatgccgaaggataagatatagtctgtgcttgcatgaaagtgtaagaagttcataagagaactgcataggtagtagcgaacttatgtgaacgacaacctcaaaaatgataaaagttaagacttacggttcttaaatatgttatttaaaattaaatataaaaccttctaaataattgttttaaataattacatttgttaacattattataggtgattaataaattgttcaccacagcattatataatatattaaatgtgataaaatcattaaaaagtgtatcaaaaaacaattaaagtgaggtgatagtagtggaaaaagcttataagtttagaatatatccaaataaaaaacaacaagagttaattaacaaaacttttggatgttgtagatttgtatataataaatatcttgctaaaagaatagatgtttataaaagcgataaagaaacttttacttataaacagtgtagttctgatttgaccaatttaaaaaaagaattaaagtggcttaaggaacctgacaaattttcactacaaaacgccttaaaagatttagataatgcatataaaaaattttttaaagaaaaagcaggatttcctaaatttaaatcaaagaaaattaatagattttcatataaaactaattttacaaatggaaacattatgtattgtggtcaacatataaaactacctaaacttggtatggttaaggtaagggataaacaaatacctcaagggagaatacttaatgctactatatctaaagagccaagtggtagatattatgtatcattatgctgtactgatgtagatattgaagtatttgaaaatactaacaatcagataggtttagatttaggaattaaagaattttgtatctcaagttgtggagaatttatagaaaatcctaagtatcttaagaggtcattaaacaaacttgctaaattacaaagagaattatcgagaaagacaatcggtagtttaaataggaataaagcaagattaaaagttgcaggacttcaagaacatatagccaatcaaagaaatgattttctacaaaaactatctactaaattaataaaagagaatgatattatttgcatagaagatttacaagtaaagaatatgattaaaaatcgtaaactatctcgcttaatttctgatgtgtcatggtcagaatttgttcgtcaattagaatacaaggctaattggcatggtagacaaattgtaaaagtaggcaaattctttgcaagttcacaaatatgcaataaatgtgggtataaaaatgaggaagttaagaacttaaatataagagaatggatttgtcctagttgtaatgaaactcacgatagagatataaatgcaagtataaatatattaaaagaaggattaagactaataacaattcaaaataaataacgtatgtaagaaccgtaggaactacggggatagcctgtggagaattagtaagacatatgttagtatgcaaaattctatgaagcaggaaccctgtgactttagtcataggaggttcagtttaacccatttagataaggaccatataggtggagtagatagtgtgttatctagtgttaaagtaaagaatattatacaagcaaattataagaaagatagtaagcaatatgatgaatatattgactcacttaaaaaagctgatatagaaccagtgctactaaaagataatatgaatattgtaatcaatagtgcagaaataaacatacatccggcttcaaaaagcaagtacgagagttcaaatgattattcaataatcactaatataagctatggagcacataagtttttatttgcaggagatgcagaggaagaaagattgtcagagtttataaatggaaatactttaaaatatgattttgttaaaatgcctcatcatggaagatatgacaaattaactgaaacatttttagagtctacttcaccccaatatgctgttattacatgttcagagaaaaaagaaccagaggaaggtgttttaaaaatattggaaagattgaatataaaaacatttttgacttctagtggagaggtagttatcaatagtgatggtaagacattgagtgtgaatcaataattttttttaaaatatctaaaaaaaatttaaaaaaatcattagcaaatattaccccttaaacatagtatattttaggagctgaaactccacatacaaaatgactaggaggtaacatattatgttggatagattttttggtgaaggcggatttggtggatgtgcttggtggataataatattattcttcttattcttagcattccaagattgttgggctgaaatggacttatgtgcatggatacctttcttaatattattattaatactttgtgaatgtggtgacgtttttgatggaggatgtggatgctaaaaaaatcaatttagatgatttaataaagcttatggtgggtataaataaaataccaaaccaatcacaatctagtgtttgaaggtagtcggaaatcccccgctaccttcttttttttattgttagaatttatttttgaattatttcatttacatataataatttttacaataaagtctgatataattaaaaagaaaataaaatttatttataggagatgtaaaaatggctatagtggataagattttcaatgagataaaacttatggttgcaagacttttattgggaaaaaaatacagtgaatatgaagaaaaagatttagtgtataatacagaagaagaagttatacttataactttaaaaagattagtttttcagggaaatgtaaacgaagcagaagaaattttatttgataaagctaagactgtaactagtgaaaatatgcagtatatagcaatagaattttatactatgcttatggaaaagactgatgaagaattagaagctatgaatttttctaaacaagaagtttatcaaggtatagaagatattagaaaagtattgaatttagaataaaagatatatgaaaatattgaaataaattaatgttaaggtgagaatattatacttatatataaaaatataatattcttattttattagttatattaggtatatcttatttaccataaaactatcttgaaaaaaattaatcttaattgtataatattactttgagtgaaaaagtattaacatttttttataagatgttttactaaaaaaatatatataaatatactgttatcaacaagaaatttaatttagtgaggtgttaagatgaaagtaggatttgaccacaaaaaatatttagaagagcagtctaaatacatcttagaaagagtaaataattttgacaaactttatttagagtttggaggaaaattgatgggagaccttcatgcaaaaagagtacttccaggatttgatgaaaatgcaaagataaaagtattacaacatatgaaagaaaaagttgaagttgtaatttgtgtctatgcaggagatatagaaagaaacaaaataagaggagactttggtatcacttatgatatggaagttttaagattaatagatgatttaagaggttatgaactagatgtaaatagtgtagtaattactagatttgaaggacaacctgctacaactgtatttataaataaattagaacgtagaggaattaaagtttataagcattatccaacaaagggatatccgtcagatgttgagactatagttagtgatgagggatatggagcaaatgaatatatagaaactacaaagccaatagtagtagtcacagcaccaggacctaatagtggaaaacttggtacttgtctaagtcagttgtatcatgaaaataaaagaggtaatgtagttggatattctaagtttgagacattcccagtttggaatgtacctgtaaaacatcctttgaatatagcttatgaagcagctacagttgatttaaaagatgtgaatatgatagattcattccaccttgaaacgtatggtgaaatgtcagtaaactacaatagagatttggaattatttccagtgcttaaaaaaataatagaaaagataactggaaaagaatcaattttccaatctccaactgatatgggtgttaatagagttggctttggaataatagatgatgaagtaataagaaaagcttctatagaagaaataataagaagatactttaaaactgcctgtgagtataaaaagggacaagttgataaaggcgcttatgatagaatgaaaatgattatggaagagcttaacttaaagccagaagatagaaatgttgtattacctgctagaaattacagtaataaattaaaagaaagtgccgacaagaatgatacttgtcctgtagttgcattagaattagaagatggtacaatattaactggtaagggttctgatttaatgaatggaacagcagcagtagtattaaatgccattaaacatttagccaatatatctgatgatatgcacttaatatcacctgtaatattagaacctatcataaacttaaaaacaaagactttagctagtagaaatgtttcacttagttgccaagaggtgttaactgcacttagtatttgtgctgtaactaatccaactgcacagtttgctatggaaaagttagcattattaaaagggtgtcaagctcattctactactatattaaatagagatgatgaacaaacatttagaaagcttggtatagatgtaacttgtgacccagaatatccttcacaaaatctttactatagttaaaattatataaaaaaatatgggctgttttaaagtaatagtttgagcagtccattacaattataataaaatcagtaggctgtcttgtataagacagtcttttgtttttaaaacatcccataaattaaatatatatactgttatccataaggaattttaaatttagttccttggaatacctattgtaaagcttttatatagtttttgcaagtgtttttaaggattttttataaattatattgaagttaatggattatagatggttttatttatggaaaatatgaatatataaagaaaataatgaaaaaataccaaaaagaaacataagtttggtataattaaaaagtaatataaataaaattaatctatttatactttaaaaggtgataataatgaaacattatagaaaaataattcatatagatatggacgctttttatgcatctatagaacaaagagataataaaaaattaaaaggaaaacctgttattgtcggtggaaatccacaaagccgaggtgtggttgcaacgtgttcttatgaagctagaaaatttggtatccattcagctatgccatcagctgtagcttacaataggtgtccatatgcagtttttgtaagacctagatttgatgtttataagagtgtgtcagagcaaataagagatatattttatagatacacggatttagttgaaccattatctttagatgaagcttacttagatgtaacaaaaaataaaaaaaatattgattcatcaattgagatagcaaagcaaataaaaaaagatatatttagagaagttggtcttacttcttcagctggtgtgtcatacaataagtttcttgctaagattgcatcagacttaagaaagccaaatgggttaactgtaataaccgaagaaaatgcccaggactttttagataaattacctgtgaataaattttttggtgttggaaaagttacttcaaatactcttaaaaatttaggtataaaaactggatatgatttaaggtgtttaaatttatttgaacttgaaaatatattcaaaaaaagaggttatgaattatataaatttgctagaggaatagacgatagaccagtggaaccaaatagggttagaaaatctgttggggctgagactacattaagtcataatttggatattgatgaagaagaaacacgcaacattcttgatgaactttgtgaagaagtatgtcatagattaaaaagctctgagaagtttggaaaaacattaacattaaaaattaaatatgaggactttacaaagataactagaagccttagtttagaacactatattgacgaatataatgatataagaagtggtgtagataatttgttgagaaatgttgaggttaatggaaaacaaattaggctattgggagttacaatatcaaacttaagtgataaaaaagaaacttataaagatattacattatttgaatacatggatagtattcaaatgtgagttttgtttaaatgaaataacactagctttaatactatataattgaggctagtgttattttatgaatatttttatactttttgttttttgacattatatactatatataaatactttatatttgtagcaatattcagacaaatagtgacctaaaaatcgtactttgtttacataaataaaatagtatgatataattataaaaacaacttataatattggagaaggttgcttgttcgaaaaaggggatgataaattatgatagagataagaaatgtaacaaaaaaaataggaaataatgttatattagatgatatttctctagttgtagaaacaggtacattggtagttttgattggttcaagtggttgtggaaagactactactttgaagcttataaacaaattaataaaacctacatctggtgagatatatattaatggcaaaccaatttctcaggaaaatgaaatagagcttagaagaaaaataggatatgttatacagaacacaggcctattccctcatcttacaataaaagaaaatatagagctaattccacgcctaaaaaaggaaaaatccgttgaagaaattgaaaaaagaacgttgcaactacttgagatggtaggacttgatagtgatgaatttttgaataagtatccttcagaacttagtggtggacagcaacaaagaattggtgttgcaagagccattgctactgatgctgaaataatattgatggatgagccttttagtgctttagacccaataacgagaacatctttacaagaacaattattttctcttcaagatgaattgaaaaaaactataatatttgtaacgcatgatatggatgaggctttaaagatagctgataaaatttgtattatgaaggatggaagaatagcacaatatgatactcccgaaaatatacttagaaagcctgcaaatgactttgtaaaagattttatcggagaagatagagtttgggataatccagaatatataaaagcaagagatattatgataaaaaatcctattgctgttaattccactagaactgtaactcaaggaatagaaattatgagaacgagtaaggttgatagcttactaattatagatagagcaaaaacattaaaaggtattgttactgtaaaagatatgaaagatattgatgataagtcaatattacttgctgatattatgtcgagtgagcctttgcatgtaaatgaaggtgataatttagtagaaatactaaatgtaatgaatcgtaattcggttggatatattccggttatttctgatgaaaataaactggtagggcttattactagaagtagtttactttctgttttaagtgaacaattcttagaaatggaggtgagtgttcttggctaatttttttaactttatactattacaaaaagataagattatagagcttttaatacaacatatgagtctaactgttacatctattttaatagctataatagttggtgttcctcttggaataattatttcaagaatctcatctcttagaaagtttgtacttggatttgtaaacttagtccaagcagttccgtctatggcacttttgggtcttcttgtacctatacttggcataggaagtaaaccagccatatttatggtagtggtttattcattactaccaattgtaaaaaatacgtatataggtataacaagtattgacccagtagtattagaatcagctaaaggtattggtcttacaagaaatcagacattatttaaaatacaattccctttagcacttcctataataatgggtggagttagaatatctgcagttacagctgttggtttgatgactcttgcagcatttataggtgctggtggtttaggatatttagtattttcaggggttcaaactgtaaataataatatgattttagcaggggcaatcccatcatgtataattgcactgttagttgattatttatttagtaaaattgaagttgcagttactccaaaaggattaaatccaaaagcacctaagaaaaattatatagcacttaaagtaatatctgtagtggttgttgtttcaatgttgttcgttgtttttagttctagtttttcaagtaaaaaagatacaataactattggttctaaagattatacagaacaacttatacttggtaatgtttatgctgaattagtagaaaaaaatacgaatcttaaagttaagaagaatttaaatctaggtggttcatctgttgcgtttaatgcaattaaatctggtgagttagacatgtatgttgactatacaggtacacttttggtaaatgtaatgaaacatgctccgattaaagatgctgatgaagcatataatgttgtaaaagatactatggaaaaagaaaatcagttaactttacttgaccctcttggatttaataatacttacacattagctatgatgcctgaaactgctgaaaagtatggaataaatactatttctgatttgactaaatatggtaaagaatttacattctcaccaactttggagtttgaaaatagagaagatggtcttgtagggctttctagagattatggtttaaaattcaaagatgtaaaagcaatgaatggaagtttaagatatacagctttagataataatgaatctcaggttatagatgcatttttaactgatggtcttattaaaaagtttaatcttaagatattagaggacgataaaaatttctttgtaccatattatgcagcaccattagtaagagaagatactttgaagaaatatcctgagttagaaaaagttatgaatatgctttcaggaaaaataaatgaagaaactatgagagaacttaactatcaagtggatgaacttggtaaatcaccagaagaagttgctcattcattcttagttaaagaaggcttagtataaaaaattaatagtttatatcaaaaatttaagggagtgtctcaaaatgaactttttagttcatgaggcactcttttttatatgaaatcaaatatattttatcatttcaacaataaaaaagaagcttatctttattttgagacagtctcttatttttatgtataccaaaaccatacctacgatttttatttataattaagtttcaaatagaatgaacaagtacaaccaattttgaatataaatatagtaaatgtgcttatatacgattttattatctgggtgattgatattgatagatagctttctttattgaatcgaagggagggggaatttgttatggataactataagaaagtgaagcaagtattgtggataattttatttgctaattttgcagtagcattattaaaaatcattattggtaatcaaataaaaagctatagtatgacagcagacggatttcattctttgtcagatggagcatctaatatagtggggcttataggtattttctttgcatctaaaccaaaagataaaaatcatccttatggacataaaaagtttgaaattataaccagtttatttataagtggtatgttgtttgttatagcaattaagataattcttagtgcagtgctaagaatagctaatccagttgtacctgctataactatagaaagtttaattgctttaattattacactttttataaatatttttgtatgcatgtatgaatatagaattgggactaaactaaatagttatgttttaatttcggattcattgcatacaagaagtgatatatttgtgtctctaggtgtattggttactttagttggtgttaagttaggatttccagtaataatagaatctatagttcctattattatttctgcattcataatttattcggcttatggaatatttaggccatctattggaattttggtcgatagagtggctgtagatgaggattatataaaagaaattgtgtttgaatttaatgaggtaagggatgttcacaatatcagaagtagaggtagcaaaagttctatttatattgacatgcatgtaatggtagacccatttataagcgtagagcaatctcatgatttaacacataaaattgagaaacaaatacaagaagaaattaatgaaaatgctcaagtaatagtccatattgaacctttttatagtttttaacttagctataaaatacaagttataaaaaaatataatttataaaaaaaatattataccataaataatttataaaaattatttatggtataatattttctataaagaaattaagtcttaatatatctaaggaggaatttacaatgagatacgttgaatatggaaagacagggaaaatggtttcagtagttggctatggaggattaaggtttgatttagaaaaaagtaatcaagaaaatgctgatttagtcaaatatgcgtatgaaaaaggtattaattactttgatacagcgccagggtattgtgatgacagaagtgaagatatatttggactagcctttagacaaatgataaaggaaggtaagaccgatttttatgtatcaactaaagaaaagccaaaagcatgtgatacatcagaaaaagctatagaggctgtaaaaaaatcaatagaacgattaggcgtatctaaaataaatttttatcatgtttggaatattagaaagatggaacattacgaactagcaatgagacctggaggtcaatatgaaggattattgaaatgtaaagaagaaggattgatagaccatatagtattttcatctcatcaaccaggagatgaggttatagatattctaagtgaaaataagtttgaaggtgtaactatgggaataaatatattaaactttccatataggctaaaaggtgccaaatatgctgttgataatggatatggtgttgtggcaatgaatccattaagtggtggaactattccaaagtataataaagaactttcttttctatcaaaagatggcgaaagtactatagaatcagctttaagattcaacataggaatttcacaaataagtatatctttgatagggtttaataaaaaacaagatatagatgatgcatgtaaaattgcagacgaaaatagaatttattcagatgaggatatacatgatattgagactagattaaataagaatatgaacgaaatatgtacaggttgtggttattgtaaagtatgtccaaaaggtattaataccccagcctatatgcttttttataatgaaaagcagatgtttaaaaagagtgatgaagaaatgacaaagttagtttatggtttaggacattggaattacacaatgaatagtaaggcaaaagctaaagaatgtatatcttgtggaaaatgtgaagttgaatgtactcagcatttacctataatagatagattaaaagaaattaaaaaatgggaagaagatggagctaatagtgttaaagtctaattaattttatactatatttgaaatttgtatagtatttagtaatgttttaaaatatagttttaatatttaaggagacagattataattttgtctccttaaattatgctttaatttgttatagtttaattccataagcaacattgtatatttttatataaagtttttcaaatattttacattaatattgcttacaaattctcattttatacaacactaatctatgttatataaacaatacttgactgattataacatcaataaagtaaatattgtggttgtaaataaagagttattcaattacaataaaacaagtaagaacattatgaagatggctattaaatataaggaataaattgtaggtgtcagcaaatcctatataatgaatggatggtgatatattgatgagtaaaatattaaaatataaaaacgagatgtttttgtttatattagttgtaataacttacttaataataactaagatatttttttctaagactactatattttataatttaaacaatacttatgatgtattgttagatacagatacaggggttttattcaatttaaatgtatttgctataagtcaagacaatagtaagcacatattgttttcagcaattatatcaatttttgcatatccaatatacctattttgtacttcaatagcaaatcctgggacaacagattttaatagtgcctatgggtttggactaatttgtctacaaataataactagtgctatgtcaataactttagtctttaatcatattaaaaagataaaaatgcagagattaactttaattttacttactatgataatgatattttcttttccacagttatttatgactttaaatgtagagagatttatatatagccaattttcattaatatttttcatagttattgcaaataagatgaaaggaaaaaattcttatttagtagaattagcagctattcctctatttggaataactattagtaatatatatttgtatttttttaatatgatatttgagtttaaattaaaaataggaaaaatgttaaaacatttaattacatttatcctaatggcatatatttgtgtagtttcaacgaagtcttatgagagttttatgaaccttggaaatgtaatacagtatgatacgaaatttataagtggagaaccaattttggaaaagattgcaatgattatagagagattattgtattcggttttttattttcctggagcaagtattaaaaaagggttatttttgcaaaatggagaagttgctacaataccagtaattcttacattattagctttatgtttttgtgttttatcagttattgaaaattcagaaaaaagagttcctaagctatgtatgggaataattatattcaatctaactttacatggtatagtaggatataatctagtcaattcaagtattatggctataaattttagttttgcagttataattttattggcttactttacgaaagcgcttagaaaaaatgaaaagaatatgtataatatatttctatcgctgttattggttactatagtaatcagtaatgtcaatggatttatagaaattttaaacatagggataaaatcatatcctgtttaaaaaataatattgaaagggtagtaagtttatgaaacagaccaatacaagtataaggcttcttactaaaatttcagattatataaagttaatgagaataaagcaatatataaagaatttctttgtattttcagctataattttttcaaacaacatactaaatataaatttatttttaaatacgtttattgcgtttgtgtgtttttgcctaatgtcatcatcagtatatgcactgaatgatgctatagacatggataaagataaaaaacatcctaaaaaatgtaatagaccagtggcaagtggaagaataagcaaaaaaagtgctaatatactatttgtagtattagctttaatttcagtctgtttatcaacagttgttagttttaatctttctataattcttagtctctatttgataaacaatatattatattctcttaaactaaagaatataatactattagatgtgttttcaatatctcttggttttatacttagggtttatgcaggatgtgtagccataagtgttagtttatcaaattggataattttatgtacatttttcttatctctgtacttagctcttggaaaacgtaaaaaagaaatagaaactctaagagatgatgcagttgaacatagaaaaatattggaagattatgacatagaaaatctaaatcaaatgatgatagttatattaagttctacaattgtatgttattcattgtattctacaagtaatccagaaaagccacatatgatatttacaacaatatttgtagtttatggtgtacttagatataattatataattaacactacaaatgaaaataatcctactgatattgtcctaaaagataatgctttaaaaataaacgtaatcttatggataattacatgtttaataatattgattttttagtgatatttttagtgataggatggggaaatacttatgaaaaaaagtgtattattacttgatgtagattatactgttataaatactgatagcatgatagatttttttatttactctttaaaaaataaaacctttaaaactattataaagttgccatacattatttttattctatttatgtatttaattagaatgatacccttgaagaaggcaaaagaggcaatcttttatccaatagtagattttagtgaagaagatttaaaaaagttttttgatgattgcataatgaaaaaaattaacgaatctatgaaaaaggtcatttacaaaaataaagaagaagataatgttataattatgataactgcatctccatatgcatatatgaaatattttaagtattatggtcttgcagacaaggttataggcacggagtttttttatgaaaattcaagatataaaaatcaattcattggagaaaactgtaagggaattgaaaaagtaaaaagaataaaggctgtattaggtaaacttgggatagagattgattatgaaaattcatatgcatattcagactctaagagtgatttaccaatgctttcattgactaaaaatgcatttttagttagtaaaaaggatggtgaggttatagagcaaataaattcataacttaatgtcacttagaataggagggaatagtttgggatatttacacatattaattttatctatggttcctgtaacagaattgaggggagccattcctataggtattgcaatgggcttaaatcctatatgggtttatgtatttagtgtaataggttctacattggtatcgattcccttgatattgacattcagacatgtattacaatttttaagagggaagaaactatttaaagggattgctgatgtaattgatagaaaaataaactcaagaatgaagaaattaaaaagtgtttcgataattggtataatactatttgtaggtataccactgccaactacaggaacatggactgcatctgctatagcttccatattaaaaatgagaataaaagatgcttttatgggagtatttcttggcaatttgttatcaggggttatagtttcagctctttctttacatataatataaaactatctaagtaatatacttggatagtttttttatgagtacatgtgaaaaatttttaataataaataaaaaatgagataaagtatttaaattcagttagttctaaaatgtttactatggcaaaagaaatatagtatagtattacttgtagggaaagtactctaaatttgtctgctgataaaatgaaatttttatatagaataaaattttagtgatacattttaattattggattgaggaggttttaaaatggaaaattcaaacactaacttaggcagtgaaagtgtgggtaaattattatttaaacttgctacacctgctattattgcacaaattgtaaatgttttatacaacatagtcgataggatttttattggtagaatggaaaatggagaagttgctatggctggtgttggagtggcctttccaataataattataataactgcatgtagttatttaatcggtatgggaggaggtccattagctgctataaaaatgggtgagcaaaacaatgatgaggcagagaaaataatgagtaacagtttttctgtactggtgattttagcaatacttttgactataggttttaagattggaaaagagcctttactttggatgtttggagcaagtgaatctacaattagatattcaatggactatttaaatatttatttaataggtacagtgtttgttcagatttcaatgggtatgaatacttttataaatacccaagggtttgctacaactggaatgatgacagttgctataggtgctttaataaacataatacttgacccgatttttatatttggctttaatatgggtgtaaaaggagctgcattagctactataattgcacaaggcgtttctgctatttgggtacttatgtttctctttggaaagaaaagtatacttaaaataaaaaagaagtatatgataccaaaagcaagtatcatcttaccagtgcttggcttgggaatctctccatttataatgcaatctacagaaagtttagtacttatagccttaaatagtaaattacaaatgtatggaggagatttagcagtaggttcaatggccataatgagcagtataatgcaaattcttatgcttcctaatatgggggttacacaaggagcacaaccaataataagttataattatggttcaggtcaacttgatagagtaaaaaagacatttaagttgtgtttattgtcatgttttacatattctactattttatggcttttattaatgatatttcctgcattttttgttagtatatttaataagaatccgcagttacttagtatgactagttggagtataaaaatatattttgctggtgcttttatgtttgggattcaaatagcttgtcaacagacatttttagcacttggaaaagcaacaatatctttggttttagctctacttagaaagattgtacttttaatacctttaatatttatactcccaacattctttaatgaaaaactttttgcagtaattttagcagagccagttgcagatataacagctgctactataacagcaatttctttctttatattttataaatgttttctatcaaaacctaaagcaataaaagaataagatatacaatataaattttttatgaaaatattttattagataaaaattagaatttgtattttaatttaataagatattttctataatgtataaatatatgaagttgaatttattttaaaaattatagtaagaaaaatgtaagtatttgcaatattaatggtataatatttacagatatgataatcaataagaggaaaggatgtttataatggaaaatgatttaacaatgcaagaattacttgaccagcaagaacaagtattcagcaaagtgaaagttggagaattgacaactggaaaaataactgcagtgagaaatgatgaagtacaattaggattagactatgggtttgatggaataatacctataagtgaattgaacatagaaaaaaatcaatatatagaagatatataccacataggtgatgaaataactgctgtaataacaaaagtatctcaaaaagatggtacaataactttatctaaattacaacttgacaaaagaaatgattttgccgagttacaaaaggcttatgatgaacatagaataataactgtaaatgttgaaaagaatatagataaaggtgtatttgctaattacaatacatatacattttttataccaatttctcaacttgatacaaaatttattacagatacatctaaatttgttggtcttaacttagaagtttatataaaagaattggatgttagaaaaaatagacttgtagcatctcatagagatgtattacaagagcgtataaataaagagagagaagaaagaagagctcaaattaaggcagaaaaagaagctgaaagagcaagaattaagcaagaaagagaagaagaaaaagctcgtatcaaagcagctaaagaagacttatttaattctcttgaagttggacaaaaaagagatggtaaggtgacaaagataatgccttatggtgcatttgtggatattggtgggattgaaggattagcacatataaataatttagcttggacaagagttgaaagtgttgaagatgttgtttcagagggacaagaagtagaagtttatgtgttggatgtaaataaagagactaaaaaaattgccttggcattaaaagacataaataatgacccttgggatttaatagcaaaagaagtacaaattgatgatgttgtcaatgctaaagttcttagaataatagaaaaaggggcttttgttcaaattaaagaaggtgtagatgcgtatttaccaatatctgaattgagtgatactagagtggctaaagttactaatgttgttaatattggagatgaggttaaagttaagattcttgattttaaaccaaagactaaaagaatgttggtttcaataaaagaagcaactagagagccagaagaggatataacagaatacctagaagtagaggaatctttaggaagtattggagaattatttaaagataaatttaaagatttagaagtgtaaaataattgaaaatggggctgttttaaaacgttacactgtctattatgacagctttagttttgaaatagccctttagctattttcacgaatttatgtaaaatattaggaggaaatttaatgaaaaagtctattatggatgtacattgtcacactctaataagtggacatgcacatagtactttcaaggaaaatgtcgaagaggcgagtaagaagaatataaaatacttaggaatatcagaccacggacctaatatgccaggaggaccacatccattctatttttataatttgcatttgcttccacgtgaagtgcaaggtgtaaagattcttaggggaatagaaggaaatataatggattatagtggtaatttagatgttcaagaagatatgttgcaacatttggattatataatcgcaagtttgcatagaccttgtatagcttctggtacaaaagaagaaaatacaaatgctattttaaaagttatggataaacctaaggtaaaaataattggacatccagatgacagtaggtatcctttagattatgaacctatagtaaaaaaagctaaagataaaaatatccttttagaaataaataattcatcattaagttcaaactctcatagaacgggtacttgggaaaatgtaagtcatatgttgacattgtgtaaaacatatggtacaagagtaattcttggtactgactctcatatatgttattctataggagaatttgaaaatgcagaaaaagttttagaagcagtagattttccagatgaattagtcataaattatcatgaagatgaaattatagaattttttgatataaatttttagaatcttgggagtgaaaaaatttgagtaaaaataagtttatctatatgaattattatgacaatggttattttaaaaaaggaatgactatatatatggttttagcacttataattttagctacaatttttatatattcaacgacaatattatatattttatgtataataacagcagtttttctatttaaacaaggtcgtgatttttcaaataaatatgagggaaaagtatatattactctcgataatcattcaatattaataaataatcaatgtatattcagtataaaatctaaacaaagtcaaaagtttaattataagataatagaaaaaatagaagtagtaaaaaatatattaaatatatacactgacgaatctaattataaaattagattaagggcattgagtttggaagatgaaaaaaaattattgaatatcatagatgaaaagatgaaaaagtttaaggcataatatcatactgttttcaatagttagcatgttttatagaattgcttatcaaaaataaaaaattgagataattattttttttgttgacaatacattttaatgtgtatataataactattaaatcaaaatatttagaaaatttaaatgattaaaaaagtgatgaatagaagtagtaagaacaatgaaactttcagagagctaaaggatggtgtgatttagtagttgatagttctgaacttgtctaggagctgttttctaagatttaaatcttagaataatcggagtaattccacgttataggaaatatagtcattataattattgtattggctattactaagggagctttttagaaagctaaatagagtggtaccgcgagcaaaacctcgtctctaattttattagagatgaggttttttttattctaatgataaaattgacatttatccttatgaagtgtgcaggattgcgtcgatataaggtatactgaatacaaaaaacagaaaaagggggaaataacatgaagtgtggaaagtataaaaaatatgataaaatgcaaatagtaaatcgtaaatggccagataatgaaatatttaaggctccaatttggtgtagtgtcgatttaagagacggaaatcagtcactgccaacgcctatgagtgtaaatgaaaaagtcagaatgttcaaaatgcttattgatacaggatttaaagaaatagaggtaggatttccatcagcatcaaatacagagtatacatttttaagaaaattaatagatgagaatatgattccagatgatgtaactatacaagtacttacacaatctagggctcatcttatagaaaaaacatttgaatcaataaagggatgtaaaaaagcaattatacatttatataactctacatctgttcttcaaagagatgtggtttttaatatgagtaaacaagaaataatagatatagcagttgaaggagcaaaattatttaatgaagaagtaaaaaaatatccagaaacagaatttacttttgaatattcaccagagagttttacaggaacagagatggattatgcacttgaaatatgtgaggcagtgatagatgtttggaaaccaactcctcaaaaaaaagtaataataaatcttccatcaacagtggaaatggcaacaccaaacgtatatgcagaccaaatagaatggttttgtaaaaatataagttgtagggattctattatactaagtttgcatactcacaatgatagaggaacttgtacggctgcaagtgaacttggattattggctggtgccgatagacttgaaggaacactatttggaaatggtgaaagaactggaaatatggatatagtaaatgtgggacttaatctttatacacaaggaatagacccagagctagattttagcaatatagataagataattggtatatatgaagactgtacaaaacttatggtacatgatagacatccatatgcaggtaatcttgtacattgtgctttttcaggttcacatcaagatgctattagaaaaggcatgatagcaatgaaaaacagagataatgattactgggaagttccatatttaccaatagaccctcatgatattggaagagaatacaaagaaattataaggataaatagccaatctggaaaaggaggagctgtttatataatggaaacagattatggatttatgatacctaagaatatgcattctgattttggaaatgtagtcaaaatggaatctgatagaattggggaagaacttagtagtgaagcaatatttaatttatttaagaaagaatatattgaagttgagagcccttataaagttaagaagtataaaataaaatcaatggatgaattaaactatgaaaatgatgattctaatgatactaacatgattgagatgactgcaagaataagttatatgggaaatgaacaaaggattgttggtataggaaatggacctgtagattcatttaataatgcactaaagcaatgtggcatgaaagattataaatttagatattactgggaacatgcattagaggaagggtcacattcaagaggggtagcttatgtaggaatagagcacaataatgaagtctattttggtgtaagtatatcggaaaacataaatacagcagctattaatgcacttatgaatgcaataaataaaagttatattgaggaggaaataaaaaatggggatgactatgacgcagaaaatattagccaaacatgctaaattaaatgaagttaagaaagggcaattaatcgaagcagatttagatgtagttttaggtaatgatataacatcaccagtagccattagagaatttgaaaaattaggaattgaagatgtttatgataagactaaagtagtgatggttttagaccactttacacctaataaagatataaagagtgcagaacaatgtaaatttacaagaagtttcgcaaaatcaaaaggagttgtaaatttttttgatgtaggagatatgggaatagagcatgttcttcttcctgaaaaaggtatagtaactgctggagatgtaattataggtgctgactctcatacttgcacatatggagcattaggagcattttctactggtgtaggttcaactgatatgggagcaggtatggctacaggaaaatgttggtttaaggttcctggagcaataaaatttgttttgaagaataaaccaaataaatggataagtggtaaagatataatacttcatataataggggagataggtgttgatggagcactttacaagtcgatggaattttgtggagatggagtagaatacttatctatggatgatagatttactatttgtaatatggcaatagaagcaggagcaaaaaatggaatctttccagtagacgataagactatggaatatataaattcacataagtgttcaactataacaaaagatgtaaatatatatgaagcagatgaagatgcagtctatgatgaagtatacgaaatagatttagccgaactaaaagaaacagtagcctttcctcatcttcctgaaaatactagaacagtagatgagatagataaggatataaagatagaccaagttgtaataggttcttgtacaaatggaagaatatcagaccttgaagtagtagctgagataatgaaaggcaaaaaagtagcagatggagttagagttatgatatttcctggaactcaaaaagtatatcttgaagctatagaaaaagggtatattaccacttttatagaggcaggagcagcagtttctacaccaacttgtggtccatgtctagggggacatatgggtatacttgcagcaggagaaaaatccatttcaacaacaaataggaatttcgtaggaagaatggggcatgttgattcagaggtgtatcttgcaagcccagctgtagcagcagcatcagctataactggaaaaatatcaaaaccatcagaaataatttaagggaggtaaaatttatgattgccaatggaagtgtttttaaattcggtgacaatatagatacagatgtaataataccagctagatatttaaatatagctgattataaagaactagcaacgcattgtatggaggatattgatgataaatttatttctaaggtaaaaaaaggagatattatagttgcaactaaaaactttggttgtggttcatcaagagaacatgcaccaattgtaataaaagaaagtggagtatcctgtgtgattgcttctacttttgctagaatattttttagaaactctataaatatagggcttcctatacttgaatgtgaagaagctgccaataacatagatgaaggggataatatagaagtagatttttctacaggtgtgataaaaaatataacaaaagaaaaagaatataaagcagaaccatttcctgagtttatgcaaaatattatattaaatgaaggcttaattaactcaataaaagcaaatagggggtagtggagtatgaattgtaatatagcagtcataaaaggtgatggtgttggaccggaaattatagatgaaggtataaaggttctaaataaaatttgttgtaaatttaatcatagattcgattgtgaatatgtattagctggaggatgcgcgattgatgaaattggagaacctctacctaataaaactgttgaaacttgtcgaaaaaacgaagctgtattgcttggtgctgttggaggaccaaagtgggataaatgtaagggagataaaagaccagagtctggtcttttaaaattaagagagtcattgggtttatttgcaaatttaagaccagctacaatgtatgaaagtataaaagaagcttcaccacttagaacggatatagttgagaaaggcattgattttgttgttgtaagagaattaacagggggcatttattttggagaacgtggaagaaaaatcattgatggtatcgaaaatgcttatgatgtagaaatatataacgaaaatgaaataagaagaattggtaagagagcttttgaaatagccagaaatagaaataaaaaacttataagtgtagataaggcaaatgtgcttgagagttcaagactttggagaagtataatggaagacttagctaaagagtttgaggatgtagaactgtcacatatgtatgttgataatgctgctatgcaagttgtaaaagaccctagccaatttgatgtaatagtgactaataatatatttggagatataatatctgatgaagcatctatgattacgggttctataggtatgttaccatcagcatcacttagagaagatagttttggtatgtatgaaccaatacatggaagtgcgcctgatatagctggaaaagatattgtaaatccaattgcaactattctatctgtaagcatgatgttaagacatagttttaacttagaagaagaagctaagtgtattgaagatgctgtacaaagtgtactcaataaaggttatagaactattgatatctataatggtgtgggaaatgttgtaggaacaagagcaatgggcgaattaatagtaaatgaaatttagaattatagtttaatttgaataatataatttaaatatataacttgtagaattagtaaaaatctattgtagtataatttgttttatgaggggtgtctcaaaataaactttattagttaatgagacactcttttttatattaagtcaaatatatttttactattttaatagcgaaaaagaggcttatatctactttgagtttctattttgataaagttattttttggaaaataatactttaaattaaacttatcatattgaagtagcctatttttattattagaagtttgcagggattttattaatattatataatatattttagaattatttaatattaagcgactactaatgtcggttaggagatggattttttggcaaagtataaagttttgaagaagcaaaatagtagtaaatcttgtttagtttgtggaacacaaaatgagctaggacttaaagcagatttttatgaacttgaaaatggagagcttgtatcaatttgtaatacaaaggattggcatcaaagttatcctgggagagttcatggaggtatgtctgctgcaatattagatgagactattggaagagctgtaagtataaatgatgaccaaatatggggagtaacagtatctttagagttgaaatataagaaaccagtaccaacagatgctactataaaagttgttggaagaataactaaagaaaacagaaaattatttgaaggtacaggagaaataattctaccaaatggagatatagcagtgacagcaactggaaagtatatgaaaatgcctattggacaaattgcagaaggtgatttttctaatgaagaatggttttttgaagaatcgaaagaaaaagtggaatatattgaactttgattaaataaaaattttatattttaaaacataaattttatatttagaaaaaataaaattcaaaaatacaataaaaatacaagataaaaataaattagttatactaaaaagatttatcgtaatagcgtcaaatttacatactaaaaaaattaatttatatagataaaaagtatattttttttgagagaataattcagaaaattcagacttatgaaaaggcagaaaatgaatgttttcataaaatatataaaataaattatatataaaaaataaattttatgttgacatagttaattcagcttgatattatagttattaaaaataaggacagtaaaaacgctatccatattacaaactaaaaaggggggaattataatgagtaagaaattatttattcctggtcctattgatgttaaagaagaagtcttgcaaaagatggctacaccaatgataggacatagaggaaaagatgcatctatgctccaaaagagtataagtgaaaagatgcaaaaactattctatacaaacaacacgatacttttatccacgtcatccggaactggtttaatggaaggctccattcgttcctgtacatccaaaaaggcagcagtattttcctgtggatcctttggtgatagatggtacaaaatggcagtggctaataatgtcccagcggatatatttaaagttgaattaggagaggcaacaacgccagaaatggttgataaggtgctttctaccggagaatacgatttaataactgtaactcacaatgaaacttcaactggaataagaaatccaatagaagaaattggagaagttgttaaaaagtatgaagatgtaatctactgtgtagatactgtaagttcagccggtggaataaaagtcgaggttgataagattggaatagatatttgtataacatcagtacaaaaagcactgggattaccaccaggaatgtctatttgcacattttctcaaaaagcaatcgatagagctaagcaagtaccttttagaggagtatatcttgatttgttagcaatgtatgaatacttaatcaagaaaaactaccaatacccttcaacaccatctctttctcacatgttcgctttagatttccaattagataatatattagatgaaggcctagataacagattcaacagacatgaagacatggcaaacttagttagaaactgggctaaaaaacacttccaaatttttaccaatgaaaatcacttatccaatacacttactgttatagaaaatactcaaggtattagtgtatcaaatttaaattcaaaattacaagaacgaggattccaaatagcaaatggctatggagatttaaaagaaaaaacttttagaatttcacatatgggtgactatactgtcgaagatgtacaagaattattagataatattgatgatatattaggttttaataaataatattgtaaaaatatgtatgttttaagataaatttagaatatataataaataatattttataaaaattacatattaaatttttaacaaacaataggaaaatttgatatgactttaataaaaaaatattttgaaaattatataaacagaaagttaaattaagtaaagttttttattgatgaaaatactttaaaaaataaaaattggaaaaattaagtgaataaaaattggaggagtttgttatgtataatatattagttactgatggaatagagaaagaagcagcgagaaaattgagagagttagattttaatgtgatagagcagttttatgaaaaagatgttttaggagataaacttaaagatgttgatgtacttgtagtacgttcagctactaaagttactaaagatgtaatagataaagcattagagggtaaaaagttgaagttgatagtaagaggtggagtaggtctggataatatagatgttaaatatgctcaagctaatggcataaaagttatgaatactccaaatgcaagcagtatatctgttgcagagcttacaataggtcaattatttgttcttgcaagattcataaatactgcaaatgtaactatgagagatggaaaatgggagaagaagaagtataaaggtacagaaattaatggaaagacacttggacttataggttttggaagaattgcaaaagaagttgcaaagagagcagaattattaggtatgaatgttatatatactgacataatgggtgaggcgcaaggttttaacaattataaattctgtgatatggaagaagttttagaaaatgcagatttcttatctttacacataccatttgataagaataagggggcagtaataactgaaaaagaaataaataagatgaagaaaggggcttatttaataaactgtgcaagaggcggtttagttgatgaaaaagatttactaaaagcattagatgaaggtaaattatcagcagctgctatagatgtttatgaacaagaacctacattaaatttagacttagtaaatcatccaagagtttctcctacacctcatattggggcatctacagtagaagctcaagaaagaataggagacgaaatagtaaatgtgattcaagatttctttcttgacttcaacaatctaataggggtagcattataaaatattttgtataattaggaggaaattagtaatggcaacgattaaaccatttaaggcgattagaccaaataaatatatagtagataaagtagcagcacttccttacgatgttatgaatagtaaagaagctagaagaattgcagaagggaatccatattcatttttgcatatagataaatcagaaattgatttagatgaaaatatagatttatatgatgaaaaagtttatttaaaagcgcgagaaaatttatatgagtttcgaaaacaagaaattctagtaaaagatgacaaagagtgtatatatatatataaacaaatcatggatggtagagctcaagttggtatagtagcatgtatatcagttgatgaaagcttgaatggaacaataaaaaaacatgagtacactcgaccagaaaaggaaattgatagaactaaacacataaaatactgtgatgctaatacgggaactatacttgtaacttacaaacatcaaagggtgatagatgatataatcaatgattttatggataataatgaacctttatatgatttcataacagatgacaagatagagcatacagtatggaagattgatagtgatgatataatagataacctagtagataaatttgaaaaattagattatctatacattgcagatggtcatcataggacagcttcagcagaaaatgtagccaaagaaatgagagctaaaaatccaaattatactggcaaagaagaatttaattacttcatagcaatgattgcaccagatgagaatttaatggttttggattataatagggttatcaaagacttaaatggtttaagcgaggaagaatttataaataaaataaaagaaaattttgaactagaagaaatagaaggaaaagaaaaatataaacctgacaaaaaaggaactttcggaatgtacctaggtgataagtggtataaaatgaaagcaaataaaaatttattagaaatagaagaccctgttgactcattagacatttctatattacaagactatgttattgatgctattttaggaattgacaatcctagagtagataaaagaattgattttatcggtggaattagaggtcttgaagaattagaaaaaagagttaatgaagatatgaaagtagcatttgcaatgtatcctactagtattgaagatttaataagagtagcagatgcaaataagataatgccagctaagtcaacatggtttgaacctaaagtaagatgtgggctattcttacatgaaataaatgaataattaataaagggctaaaaagtgtacaattcactttttagcccttgtttttttgattgaaaatcgtatgtggaatataaattctataagttgatattcttaataatagttacctttttttagaaatggataattttaggatatagatagtcatattctatgctataattgaggatgaaaattcatataattgtatttgtatatttataaggttttaaatatgtatttataatagtattgttatatattttattataattataaaaaagttaataaaaaaagtgattttgaaatttatattttatttttataaatataattattatatttataaaaataaaatagtaaaaggatattataatattttactagaattattatctggtaacttaagttttgagtattaatctaaaatatatgtttttatagggtttaaattttatgtatacaaaattaatttgctaactgaatcatataaaaaaaacaaaatattttttagagggaatgattagatactattttctttgttatgaaattaattgaagagtaattaattagaaaaggaataaataataatgaatatattacattattactttttgataaatcaaaaataaagttatagtttttaatattaattaagaatgatgaaatatgaataaagattttacaaataaatcttaagctatcttatttaattctaatgcaggaagaaggtaaatgtatattgaaaaaatcatagaaatagaagtaaacaacttaaacaaatacaaaggtttgcaaaagaagtaatataattatatacaatgaggatgtgagtatgatgaacagactaaagccaagaattttaggtattagtatcttgtttattattataattattttaacatgtggagctgttttcaagtttaaatttaaattagataataaattaaaagaaaccacacatacatatttgtctgagtttacagaacacaatataattaatctcaagacaagacttagtggtcaatttgacatgcttgaatctattgctaacttcataggaaacttgaataatataaataatgaaatggtgattgctttaatggattctgatgtaaagcgaagttctttaattagaatgactatctctacattagatggggaatgttattctaatgatggaatcacccataatgttcaagatagagattattttaaaaaagctaaaaatggagaaaagaatatttcagagcctttaaaatctattgttaataataaagaaataatagttttatctaccccagtttataaaagtgggaaaatagttggtgttttaagtggaatttatgattcaaaaaagttaaatgagttattaggattatctgcatttgatgaaaaagcagatgtttttgttgcaaagaaaaatggagatatagttgctcaaaaaacaaataaaaatagaaagacgatatcatgtatatttcagctttttgacaaagataattgtgatgaagatgattgtctaaaaactataaaagaaaatatgaaaaatgataagtctggatattttaattataacttagataatgaaaaatttatgttaaactatcagccacttggagttaatgattggtatgttttttctgttgtgccaaataaaatagtgtctattcagtcagagaatatatcttatgatgtatatatttttgcattagaaatactactagttatattgatttttataatatatatagcatgtattataaataataacaccaaaattattataaatgaaaaagaaaaatttaaagtactcactgataatatattaggaggggttaaaacctgtttaaaagatgaatatatgactatgacatatgtaagtcaggggtttttagagcttacaggttactcttgtgaagatttaaataaaatatttaaaaatagatttaaagacatgatttataaagatgatttagacaagtttaattgtattattctaaatcaattagaaaaacaagataaaattgaagttgaatatagaattgtaagaaaagatggaagtataatttggattttggagagaagtaagtctataaatgataataaaggaagtgagtgtattcagggagttttaactgatataacagaacttaagaaaatacaagaagagttagattcaaaaagatttgaaatacaggctatcaatgatagtattgttggtggaatagtgataactgagataaatgatgattttgatagtatatatttaaatgaaggttatttaaatatgattggatatacacgcaaacaactggaagatgagctaaataataaattaatcaaacttatttttaaagatgatagaacagaattaattaatagtataaacaaacaactcaaattaagtgatacatttgcatctgaacaaagagttgaaaaaagggatggtactattatatggattttattaaaaggaagaaagataatttatgataatggaaaatctgtactttgttgtgttattgtagatatcacttctgctaaattattagagcaagaacttaaaaagagtgaagaacgtcatgaaatcattctaaagcagacgcaaaatatcataatagaatgggatatagaaaaagataaaatgaatatatcacctaattggtataataagtttaaatatgaccctataactgaaaacgcaacaaaaaatataattaaatcagtagatatatatcatgatgatatggataagtttatttcattaattaaacttacttcacaaggtagtgagtatgaagagtgtgaaattagacttagaactagagatactatttacgcttggtttagtataaaggcaacaactttatttgataataatggtaaaccttataaagtagtaggaagtttgactgatattgatgaatcaaaacgagaagctgaaaagttgaaagaaagggcagaaaaagaccctcttacagatttgtataataaaaaagcatcacaatcacttatagaagagtacataacattggataaaaaaagaaaaggtgctttaatgattattgatattgataactttaaaggaataaatgataatttaggacatttatatggggatgctgtattaagtgaaattgcaaatgacctaataaatctatttagagcaaccgatatagtaggcagaattggtggagatgagtttattgtatttataaaagatatttctgaaacaagagatattataaataaagcagaagaattggtaaaaacatttgaaaggtcttttttaggtaaaggacgaaattataaaatatcattaagtgtaggaattgctaagtttccacaagatggtatggactatatgacactatttagaaatgcggatatggctctttactcagccaaagggaagggtaagaattgttatacattgtatgataaaaaaattgataaagtccaatatataactaatacaagaaatgcaggagatagtgataatgtagagatgtcttttaaagaacatatcacaaattatatatttgatatactatatgaatcaagtgatatagaagtggcagtaaatttaattctaagtattgtaggtaaacactttaatgtgagtcgcatgtatatatttgaaaattcagatgataatcgagtatgtaaaaatacatttgaatggtgtaacgaaggtgtaacctcggaaattaataatcttaaaaatatttgttacaaggatttaggcaactatcttttaaattttaatgcagatgggttattttattgtaatgatattgaaaatttaggtagtgatgtgaaaaaagtacttaagccacaaggcatacgttcaatattacaatgtaaaattttagagggcaatgaatttagagggttcataggatttgatgaatgttcatataatcgtatgtggactaatgatgaagtgaacactttgacatttatatctaaaacgctcagtatgtttttattaaaaatgcgtattcagagtaagctagaagagtctttaacaattcaaaaatctgtgatggataatatggatatatgggcatatgttgttgacaggaatacctatgaattattatttatcaataaaaaaatgcttgagtcagcatcaaacactcatgtaggtgatttatgttataaagcgatatggaataatcaagataaaccttgtaaaaaatgccctatgatatatttaaaagatggtgatgatacttataaatcatttatgcgcaataaaaagtttgaggtacaggcaaatataactacaactactttgaaatggtttgatgggaaagatgcatgtttaatatttggaagtgaagtaactagtattgaagctgaagaaaatacttaaaatactgtgttatatatatacttaaaatcgcaatttgaatttattagacttaaaatgtctatataaatcatttaagttgtggttttaagtattttttatgatataattaagcgttaagaacaaaattaaaagatacttttgtataaaaaaatatttgttaaatatatattgagcaggtgataatatggaaaataagtttttaccaataagcaaacaagatatgatagatagaggatgggaagaattagattttgttctagttacaggagatgcttatgtggaccatcatagttttggaacagcaataatatctagagttttagaaaatgctgggtataaagttggaataatagctcaaccagactggagaactacagatgattttatgaagctaggaaaaccgagacttgcatttctagttaatgcaggaaatatggattcaatggtcaatcattattctgtaagtaaaaagcatagagaaaaggatatgtattctccaggtgggaaaatgggttatagaccagatagagctactatagtatattgcaataaaataagagaagcatacagtgatgttgcaatagtaataggtggaattgaagcgagtttaagaagatttgcacactatgattattggagtgataaggttagaaagtctatgttaatagatagtggagcagatttattagtttatggtatgagtgaaaagcagattgtagaagtagccaatgcacttaatgatggatatgacccaaaatatattagacatattgatgggacatgctatatttcagatacattggaagaaatatatgataaatatatattaattccatcatataaagaaatttgtgaagataaaatgaagtatgtagaagcttttaaaattcaatatgatgagcaagacccatttagaggtaatataattgttcaacctcatggaagtaagtatctggttcaaaataagccagaaaaaccacttagtagagaagaactagatgaagtatatggattaccatatcagaagacataccatcctgtgtatgaaaaatttggaggaataccagctatagaagaagtaaaatttagtatagtaagttcaagaggctgttttggtagttgttcattttgtgcaataacatttcatcaaggtagagcagtgcaaagtagaagtgaaaaatcaattattgatgaagcaataggaataacaaatttagatgattttaaagggtatatacatgatgttggaggtccaacagctaattttagaagaccagcatgtaaaaaacaaattactaaaggtgcttgtaaaaatagacaatgcttatctccatcaccatgtaaaaatttagatgcagaccacagtgaatacttacatttacttagagctgtaagaaaattacctaaaataaaaaaggtgtttgtgcgttctggaattagatacgattatgtaatggcagataagaacaataaatttcttagagagttgatagagcatcatgtaagtggtcagttaaaggtagccccagaacatatatcagaagaagttttaaagtatatgcaaaaaccagcaggaaaaacttatgataaatttagacagaagttttttgctataaatgaagaattaggtaaaaagcaatatttgataccctatttaatgtctagtcaccctggttctaccttaaatagcgctatagagttagcagagtatttaagagatactcactaccaaccagagcaggttcaggatttttatccaactccagggactctatctacaaccatgttttatacaggtattgacccgcttacaatgaagccagtttatgttcctaaatcaaaacgtgacaaggcaatgcaaagggctttattacaatatagagcacctagaaattatgatttggtatactctgcgttagttgaagcaggaagagaagacttaattggttttggacatagatgtcttataaagccaaaaaatgaaaagccttattttaatagaaataattctaaaaaaaatgtatctaaaggaacaaataaaaacaaaaaaactaatacaaataacagaagtaataaaaatcaacaaaaaagttcaactaaaaaaaagaaaaaacattaaagtataaataaaaatacttaaaaaagaaggattattcgataaattaacagaaattagtataaataaatataattattttaatgacgttacctttgggaggaagagatgaaaaagtatatttctataatattattagtggtggtgactatggttgttttggtaggatgttcaccaggaaaagataaccctaaaaataaggagctatcagttgtcaaacaagtaaaagtagctgttccagatggactaccagcagtggcaatagctaaacttgcaaatgaaaatccagagattaaagaaggatatgaaacagtgtatagcattgaaaagacacctgaggcgatttccactagagtgatgaaaaaagatgcagatatagctatagttccttcaaacatggctgcaatagcgtataataaaacttcatcatataatattgttggaactgtaggaatgggttcactttatttggtgtcaacagaaaatataaaagattattctgatttagttggtaaagaagttggatgtactggaaaaggacttactccagacataactataaaaagtcttttgttacaaaaggatataaattattcaaatataaaatttaattatgtaaattcagcaagtgaactggtaccattattggctactggtaaagttaagacaggtattgttccagaacctgcacttagtgctttgatgtctaaaaatccagacataaaaattataaaaagtttaaatgactcatggaaggaagtaagtggttcaaaagacggttatcctcaatctactttaattgtaaagtctgaatttttaagagataataaagattttgttgattcttttgtaggtcaattatcaaatagtatagattgggcaaacaaaaatcctgaagaattaggtgcatattctgaaaaaataaaaatatctactgaatcaaagataataggaaaatctcttgaaagagctaatttaaaatatattccagttaaggacatgattaaagattataaaaattactatgagaaattagctaattttgatgataagacattaggaggcaaagtaccagatgaagcaatatactttgttgagaaataaaaaaaataaagaacaatttatagataaaatggaggtaacactttcttgtgttatcctcttatttttatggcaaattattgctttaaaaattgataatgatatttttttaccaacagtaggtcaagtatttaatagtataaaagagattatgctaaattctagtttctatatagatatactttactctatggggagatgtttttttagttttttactggctatgatttttgccattatactttcaatagtatcttatttaaatagattttttagaaacttattaaagccaatcaatgctttgacacgttcaataccaactatgatattggtagtacttgcacttatttggtttgaaaaggatagtaccccttttatagttggatttactatagtttttcctatattgtatgataacgttttgggcgctatattgaatatagacaagaacttattagaaatggctaatgtgtataaaataaggtttatagataaggtgttaaaaatttatttaccagccataaaatttcaaattatatctatactagtatcaacattctctttaagtttgaaagttgctatagcaggagaggtatatagtcaacctacatatggtattggaactatgatacagactgaaaaaattaactttaatacatctggaatatttgcatggataattattgttcttttaatatctgctattttacaaatagcccaaaagtttttagcaaggagagcttttttatggaaaagataaagttgagtattgaaaatataaataaaagatatgatagtcgtattatatttagagattttaatattgatttttatgtaaatgaggtaaattgtatccttggaaaatctggttgtggaaaaactacactcttgaacataataagtgggattattaaaaatgacaccaacaatctaaatatcaaagaaaatttaaatagagtaggaaataagcttgaagctagttacatatttcaagatgatagacttatagactggttaacagtagaagaaaatataaagatagttgtaaataaatactataataaaactcaattaaataaaatttgtgatgaatacttggaattggttggaattagtgattataaaaaattctatcctcagatgcttagtggaggtattagacaaagagtaaatattgctagagcttttatatatccatcaaaaaacattataatggatgaaccttttaaatctattgatgcaaagaatacacagcttataatggataatttcagaaatatattaagaaaagaaaagagaactgtattatttgtaactcataatattgaggaagcattgtttttagcagataggatatttattttaggagactctccaattagaataaaaaaaatattaaaaaattctaaggaattggaaaaaaatgaagttttgaagttgatatagagttataataatactgtcgttttaaaatatatttggttaaaatctataagactatattaaaatagtacagaatattcaaaactgtgtataatgttcgtattttataaaaaggaagtgaatgtatggttaagactaatgctatgagaatattagattcaaataagattgattataaagtaatgtcttatgaagtgaaaagtgaacatgtggatggtgttgaggtggcacatgatataggaagagatgtaaatgaagtgtataagacattagtaactcaaggagttagtaagaatatatatgtatatgtaataccagtacatgaaaacttagacttaaaaaaggctgcaaaagtagctaaagagaaaagtgtagagatgattcatgtaaaagatataaataagcttacaggttatattagaggcggatgttctcctataggtatgaaaaagctttataaaacttttgtaaatgaaagtgcaaagaatttagatacaattattgtgagtgcaggaaaaataggatatcaaatagaactatctccatttgatttacaaagacttataaaagtagaatttgtagatgtaataaaaaaataagaattacatataaaatatagagcttatattcttaataataggtgttgtaatattaataaaatgaataataattttaaaataaatattcagttacttatgtgtaattggtataaaaatattgagaaattttaaaaacaatggtaaagtgtaagtataatcacgaatattttttataaagtaatggagggatgttcgcttgagaaaaataaaatctgaacaaatcgtcgagcaggtaaaaaaactttgtatagaagcgagcctatatttaggagaagatgttttaagttgtataaaagaaaaagcgaaaagcgaaaagagtgaagttggaaaaaatatattgaatatattagttgaaaatgctgaaatagctaaagaaaaaaatataccaatatgccaagatactggtatggctgtattttttgttgaaataggacaagaagttttaattgaaggagacacacttactgatgctataaatgagggagtaagacaagggtatgaagaaggctacttaagaaaatctgttgtaagtccaattaacagagtaaatacaaaagataatacacctgctgttattcattatgatatggtaaaaggtgataaaattaaaatagaatttgcagctaagggatttggaagcgaaaatatgagtaagatgaaaatgttaaagccatcagatggattggaaggaattaaaaaattcataatagatacagtttcagaagctggacctaacccatgccctcctatggtaattggagttggtataggtgggactgtggacaaatgtgctcaaatagctaaaaaggcactttttagagaactaggtgaatttaataaggacgaaaatatagcaaaacttgaaagtgaactattaacagctattaataaacttggtataggacctcaaggcttaggtggtactacaacagctttgggattaaacatagagacttttcctacacacatagcaggtctacctgttgttgtaaatataaactgccatgcatcaagacataagaaggtagtaatttaggaggaaaataaaatgataaaaataactacacctgtaaatgaaattgatatagcaaaattaaattgtggagatacaattagtttgagtggtatactttatacagcaagagatgctgctcataaaagattgatagattgtataaataaaggtgaagaattaccatttgacgtatatggtcaaggaatatattatgtaggacctactcctacaaagccaggagaagttataggtgctgcaggtccaacgacgagttatagaatggatgatttgactatacctcttttagaaagaggtcttagattgatgataggcaagggaaaaagaagtgatgaagttatagaaggtatgcaaaaatacggagcagtttatcttgctgcaataggaggagctggagcgtatatttcaaattcaataaaatcatgtgaaattattgcatatgaagatttaggagctgaagctataagaaagattgtagtagaagaccttaaacttacagtagcaatagatagctatggaaataatatatatgagcaaggtcgagcaatttatgaatgtaaataatgtttagaaataaatatgaatatcaaaattaaaaatagttgtgtatattttaaggaggaaaattgatgtctaaggattatgcaaaattggcattagaaatgcatgaaatcaacaaagggaaagtaagtgtagaaagcaaggtagaagttaaaactaaggatgatttatcaacagcatatacaccaggggttgctgaaccttgtttaaaaatacatgaaaatcaagatgatgtttatatatacacttctaaagggaatctagtagcagtagttagtgatggaagtgctgtacttggattaggtaacattggtgctgaagcatctatacctgttatggaaggtaaagctatattatttaaacaatttgcagatgtagacgcttttccaatatgtttaaagactaatgatgtagatgagatagttaaatctgtagagttgatggagcctgtatttggaggtataaatttggaagacatatcttctccaagatgttttgagatagaagagagattaaaaaaatctttaagtatacctgtttttcatgatgaccaacatgggacagcaataatagttgcagcagccataataaactcaataaagttaattgaaaataaaaaaatagaagatttagaaatagttataaacggagcaggagctgctggtatagccatagcaaagatactacttaatatgaatgttaaaaatataatcttatgtgatagaagtggagcattggaagctagtatagaaaatctaaactatgttcaaaaagaaatgttaaaagtaacaaatataagaaatgaaaaaggacctttaaaagatattataaaaggaaaagatgtatttattggtgtttcaggtccaggagctgttacaaaggaaatggttgaaagtatgtctgagaagccaataatattggcaatggcaaatcctactccagagataatgccagaagaagcaaaattaggtggagcatttataatgggaacaggtcgttcagacttccctaatcaagtcaataatgtactggcttttcctggaatatttagaggagcattagatgttaaggctaaagagataaatgaagaaatgaagatagctgctgcatatgcaattgctaatacaataagtgatgaagaaatatgcccagagtatatattaccagatgtatttaataagaatgtagtaaaaaatgttgctaaggcagttaaagaagcagcgataaaaactaaagtaaatagaatataaatttttataacttattaaaaactagaaaagtataaaagactagtgaaattatgtacagtgggatgattttattagtctttttattttaaatatgacacaataatgtcatattaagcttgatataattttaatatggttaggagccaaagaaaaatataaggagtgatttaaaatggaagaaactaaattttgccaatgctgtgcaatgccaatgggacaaactgatgaattatatgggacaaataaagatggaagtaaaagtactgattattgtagttattgttttaaagatggtgagtttacagctgatataagtatggaagagatgatagaagtttgtatccctcatatgcttcaaagtaataaggatatgactgaagatgaagcaagaacaatgatgaacaatttctttccaacattaaaacgctggaaataattttatgcaaaattagttatatgcaaaacatgaaatatggtgttgagaataaggggtggtgtgctttatagcataccacctgttttgttacttgctagttcagttattcttgtatgcttaaatatgttctcatctctctttctattttaaattgtaaaaatctaaaatatgttatttatattctacttctttatccatgtctttttctacctcaagtcaaatacaactacaaaatcatcattttcaattcactgtttaatagaattaacagataaagagttataaaattttctattttttatataaaataatacaggtcaagctgacttctagctacttgggatagtgtatatatttatgatagttataggagtaataccaatcattagactgttgatttgtgtagtcttttgtaaaaacatttgttttaatatattgagtttttgaaaaagtaaaattataattataataaattaagtgtaataatgtattagaagtaaaaataattaaaatagaggtgattaaatgagcagtatattgttagttgaagatgatttaagcttgatatatggattagagttctctatacaaaaaagtggatttagtatagacatagcaaggacagtaaaagaagctatgcaaatgtatgaggaaaaaaattatgacttattgcttttagatgtatccctacctgatggtaatggatttcagatttgcgaaaaagtacgagaggtttctaatatacccattatatttttgactgcttcagatgaagaggtaaatgtagtgatgggtcttgatatgggtggcgacgattatataacaaaaccttttaaattaaatgaattaatttcaagaataaaagcattacttagacgttataatgttgcaagtaatgtgaatgaattaagttcaaataatattactattaaattacttgaaaatcgtgtttttaaaggtgaatttgaggtggaacttactacagcagaatataaattattgtgcttatttatgaaaaataaaaatattgtacttactagaaaaaacatattggacaagttatgggatggaaatggtagctttatagatgacaatacattatcagtatatgtaagacgattgagaaataaaattgaagataatcctgaaaatcctaagtttctattgaccgttagaagaatgggttataagtggaatgtaattaagtgagggtattaatatgaagatattttctaataaagatataaaaatattttttttaattcttatatctattttagtaatgtttattatagtagggcaaatagtggttataagtataactaacaattataaaaaaacgttgatagaacatgattataatatagctggatacttatatagtataggtgttgataaatctaaaataccatcagcatttgttgcacatgaagataaatatattttaaaaggaaaagaaatactagatacagctggatatggatttgatatagatgttagctttacaccaagtgtaaaattgtttcaaagtaaatatataaaaactatgtctatctatttattagtattttttactatgattattttcatactatatatgtatttttttaggcaacaaagtaagatagaagaggctagttataaaattgatttatttatgaatggaaatataaatgaaagactaaatacatatgaagaaggtagcttatcaaaattatttagttcaatagatgttatgtcgacatctttaaatacacatatattaaaagaaaaacagagcagagaatttcttaaaaatacaatttcggatatatcgcatcaattaaaaactccacttacagctttaataatgtacaatcagatactacaagaagaaagtcataatagtgatgtcgttgaagcttttgtacaaaaaagtcaaagtgaactagaacgcattgaaacattgattaagaatttactaaagattacaaagatagattcaaaaacaatagttctcaataaaaataatgttaatcttaaaaatttaattgtcaaaattttgtatagctttgaaactagggcagaaaaagaaggaaaggttatttctataaatggttcagaaaatacattgttgttctgcgattatgaatggatgtcagaggctttaagtaatcttataaagaatgcattagataatacaaaagagaatgataaaataacgatagagtggtttgagacgactataaccaccattgtttcagttaaagacactggaaatggaatccatgttgaggatattcatcatatatttaaaaggttttatagaagtaagttttcaaaagataatcaaggtttaggactgggattaccactagttaaatctattgtggaacaacataatggtactatttctgtagaaagtaaactatcacaaggaagtacattcaccataagttttttaaagcttactaatatgtaagataaaatacatcttgcagtaaggtatatagattattattatattaatcaattagaaaggtgagagagaaaatggatattcttgtggttaataatttatgtaaaacatatggaaatggatatacaaaagtagaggcattgaaagatgtatcctttacagtttcaaaaggagagtttgtgactgtagttggagaatctggttcaggaaagagtacactattaaatctcttaggaggtcttgatactccaacatcagggagaatatttattgatggtaaagaaatatgttcaatgaaagaggaaaaacagactatttttagacgtcgtaacatagggtttatatttcaggcatataaccttataccagaactaactgtggagcaaaatataatattcccattgttattagattataaaaaaccagatactatttacttagatgaagtattgactattttaggtcttaaagataggaaaaatcatcttccaaatcaattatctggtggtcaacaacagagagttgcaattggaagggctttgattacaaagccaagtattatactggcagatgagccaacgggaaatcttgacagtaaaaatagtaatgatgtaatttcacttttaaaagtgactgcagaaaagtataatcaaaccattattatgataactcataatacgaatatagcttctacagcagatagaatactacaggtttctgatggtgtgcttacagacctgggggtgaatagagaatgagaagctacttagaattagtaccacaatatgcaaaagtacataagaaaaaaaatagaactacaattttatgtattattattgcagtatgcttagttactgctatctttggacttgcagatatggctatacaatgtcaaaagatacaatttattaaagatgatggaaattggcacatagtaattagaaatattgatgaaaagtttatatcagaaataaatagtagagtagatatagctcaccatggtagggggcaagtcgttgacagtggagagtttaaatcaaaggagattttgatacaaggtttagatgaagaagtagcaaaacaatttaacttagaaataataaggggtcgttatcctattggggagaatgagactttaatagatgaggatgcagttaaaagctttaatctaaaaataggagattttatcaaaataaaattagcagatggtagaaataaaaattataagatagtaggtgaatattcatcaatatcaagcttaagagctacagataaacatggattaatactttcaatattgggtacacaagctattaaaaaatcagaaacgtacgattattattatattacatttaaagaaaaggttaatattagaaaagccacttctgatattaaaaataccttcaatttaagtgataaacaaatcggtaaaaatgaaagattactttctattataggtcaaggcgactctgacttttctaaaccactgtatttaacagcaggattactttttgtacttgttttagtagcaagtattatcatgatatataatagttttaacatgagtgtaattgagagagttaaattttttggtctgttacgttgtctagggtcatcaaaacatcaagttaaaaaatttgttgttttagaaagtttaattttaagtataaaagctattccaataggcttagtattaggaagtcttgtaactattatatcttctatatttcttaagtatgttaatgagttattcagctcaatgccaattttaaaagttagttttattggtattgcatttggaataattgtagggtttttaactgtaatattatcagctattattccagcaaaaaaagcttcccgtgtatctccacttagcgctgtacgtgggaatctaatgtccaaagaaattttaaataacgggaagacaagtaaagttgcaaatacaggaagttttaaaattgagacttctatgggattaaatcatgctttttcaagaaagaaatcttttgtacttatgacttcttcatttgccattagtattatactatttttaggttttagtgtgcttatagaccttatgtatcaaggacttaagcctatgaagccagaagctcctcatatatctattgttgaccctaattttaagtctgttttaactaaggaagatattaatgaaataagcaatatcaaaggagtaaagaaagtatacagtagaatgatgacggatatagaagctacatataatgggaagaagacaaaatcacaattaatttcttatgaaaagtatcaatttaattgggcaaaaaaatatctattaaaaggagaagttaatgaaaataaactacagtcagaaaaccttgcattagtagaagaggggcatggatttgatataggagataagatatatattaaaaatagaaatgctgaaaaagagttagaggtaggaggtatactttcctcaattccatttgaggctaaagataaatatattggaaatattataacatctgaaaatacttttacgaatataacaggtataaagggttatataataatggatattcaggttgataaagatactcctggagatttaattgaaaatataagacgtgtagtagatgataacttagaggtcagagataaaagacaaagtaacttagaggttaaaaattcgttttatactatggcaacatttgtatatggatttgtgtttattattgcgattataagcatgtttaatatcataaatagcatgaatataagtgttacaagtagaaagaattactatggtgttatgcgtgcagtaggcatatccaacagacaattaagaagaatggtaatagtagaggcaggttcatatgcaatgagtggttgtttattaggtagtatactaggattaatgttacataggtatatgtttatatcgttagtaagttcaatgtttcatttagagtggcaagtaccttttaatttactacttatcactgtactaactatgataataataactttattatcagtaagaaaaccagtcaaaaagatttgtgaattagatataatagactcaataaatgcacaataaatatagctgttgatttaaattaaaaaaacgaagtaaaaatgaaatagaaaatatttttcatttttacttcgttttttatattataaaatttttgttatgttacaaaatttctataaagatgatgtgaatctaaacattatatgacaacgtgagcatttaagttaaaatattttaaatatactattttagataagttccttcttcatcttgataaattaatccttttttcataagcactccaagagctcgtttaaaatttttcttacttgaattaaataatatagaaatatctttagggtcagatttatcattaaatctcatatatccatcagaaccctctaaataacttaaaatcttattttctaaagtatcaagttcatcctttctatttcctctaggagaaagaccaagttttccatcttcatatatttttatgacatgtaaattttcaagaacatcaccagcttttagttcagtaaagtactcattatgaagtattacaccagcatatttattgtctacacatatcattgcagaattattagtttgaaatccatatacaactccagttacaatatctcctacattgtaagtatggtctgttaataaatatgaatctatatctgtagtagcagcaattcttttgcttttgtctaaatatatataaaataaatatttttcgtctctaaatagtggataagtcttagctttaaaaggaactagtatgtctttaggaagtcccatatctataaaagtaccaatgtccgtattatcaactacttttaaatgtgctacatccccaaccttagctaaaggcggtattaaagttgcagcagttctgtcatcagaatctttaaatatgaaagcatttacttcatcacctatgtttatttcattttttccgattaatctattatgaagaagtatatcgtcttttgtgttattagtttgtccatccaaaaaatatccaaattcagtttttctttttactgtaagtttattaaaatcacctatgtttatcaaattaaaatcatcctctcattttatatttataatttagccataatatacttatgtagtagtttgtcacagtatctatattagtattagtgaaatttacaataaataatatagttatttatgtatttttcaattctctagcttcttatatagtataaactccaatttcttttttgtctttaggttttactaaaatttttacaaaataagttaaaaagtattgaaataaaatttcttttaaagtataattggtatataccaaaattggtatataccatatcgaaaagtggtgactatatgaaaatagtaaataaatctagtaatataccattgcatactcaattaagttcaataataagagagatgatagaaactggtgagcttaaagagggtgatgcaataatgccagaaagagaactttgcaacatacaaaatgtaagtcgtatgacagtaaataaaaccattgttggattagtcacagaaggacttctttatagggtacaaggtaaagggacattcgttgcaaagcaaaaaaagaagtatcagttttcaaatgtaaaaggttttactgatgttatgaaagaaaagggagtaaacataaaaacggatatattatcctttgagatggaactaccagatgatttagttaaaagaaagcttggaataagtgataatactacaaatatatataagattgtcagacttagatatactgatggagagccatttggattagaaatagtatatctatcagaagaaatgtgtaaaggtctaacaaaagggatattggataattcttcattatatagggttttaaatgaaaaatatggctataagatacaaaaagctgaacaagtaatggagccagtaatactttcagatgaagaaagtaagcttcttgaaacagatgaaggtgctttagctcttaaacttcatagaaattcctataatagagaaggtagccctatagaatataccatatcaatatttagaacagataaatatcaatatgaaatagtattgagtgagtaggtgaataatatgaaatgtttaattaatggaaagataatattaaaaaatcaaatcttggaaaataaagtattagtatttgatgaaaaaataattgatatagctgatagtgtaccaaaagattgtgaagttatagatgctgatggaaaatatatatctccagggcttattgatattcatatacatggaaatatgggaaaagatacaatggattcgactgatgaatctattgaaacaatttcaaaatcaattatgagacatggagtaacatcttttcttccaactacaatgactatggataaagaacatgtttatgatgcacttgaagttattaaaaaagcccaaaatagaaagcttgaaggggcacaagtattaggagcacatttagaaggaccttttataaatgagaattataagggagcacaaaatgaaaaatttataataaattcaaaatacgaatttataaaagaatataaagatgttataaaagttataacttatgctccagaaaaagatattgattttgattttactagagaaataaaaagatgtacagatatagttttatctattggtcatagtaatgcaaattatgaccaagctaaagaagctataaatttaggagtaactaatataactcacatgttcaatgcaatgactggtttaaaccatagagacccaggcgttgttggtgcagcacttacaactaatgtgtacagtgagctaatagcagatacaatccatataaataaagatttatttcaatttatactaaataataaagggaaagaaagactgattttaataacagattctatagaagctggtggtcttgaagatggcaattattctcttggaggtcagaaagtcatagttaagggtaatgaagctagacttgaaaatggagcattagctggaagtgtgttgtctttaaataaaatggtatttaacttcttagataatacaaaccttaaagtgaatgaagcaattaatttagcttctttaaatccagcaacatctttgggaataaatgacaaaaaaggaagcttagaaataggtaaggatgcagatatagctgtatttgatgagaatttagattgtaaaatgacactttgcttgggggacgtagtatataaaaatatatagtatacaaaacaaactttaaagacagtaaaaacaatataaaaaataataaattaaacttacattagttaaagtagtagttaaaatttaggaggaataagatgagagtattagtgtgtaaagattatgatggaatgagtaaaaaagccgctgaaatgatagcagctcaaatagttttaaaaccaaattcaatactgggactagctacaggaagtacaccagtaggtatgtatagagatttagtaaaaaaatacaatgataatatagtagatttttcagatgtgatgagctttaatttagatgaatattataagttaccaatatctaatgaccaaagctatgattattttatgaaagagaatctatttaatcatgtaaacataaagctagaaaatactcatctaccaaatggaatggctgatgatattgaaaaagagtgtctgaactatgaagcttctatagatgcagctggtggtatagatgtacaagtacttggaataggtcgtaatgctcatataggttttaatgaacctgatactaaatttgcaaaaagaactcatgtagttgaacttacagagtctacaatagaagctaatgcaagattctttaaatcaagagaagatgttcctaaaaaagctgtaagtatgggaataggttcaatattgaagtctaagaaaatattgcttttagcttcaggagaagaaaaagctgatgcagtatataatactgtttacggagatataactccagaagttcctggttctatacttcaacttcataaagacactatagttatagtagatgaagcagcagcaagtaaactgaatccaaaagattataaattagtataagaatagaatgtagtttaagtgaaaaatagctatcattgaataatcaaatttatttaatgatagctatttttatttaaattttttacttctttttatttaaattagttattattgtttaaattacttgcttattactttttacgaaaactcgttatcaagaagtatccgaataagatgttaaaaattattatgtttagtgggattctatcaagcataataaaattacctataattgggatattaccaattggaaacataaagaagaatacaggcatcagtgatagtaaaaaagatggaaaacaaagaagaagtaatcttggaatatcaatataccaactaccatcctttttgtattctctaatcaataattcagttcctagtaacaaaccaataccaccagaggaaattaaattaataaaaatgtatcttttaaagtcttgcatataaccagtgtgaaattgagtatagaaatcataatttaatttaacggctaaaaaatatataagcaatagaatgattaaaaataaaagatatctaagagcttttttcattttaaattctcccttcagaaatactttattcagttttattttgttggaatctgattttatcatttagtttaagaaatccataatattagtgaagaatgaaataagtattatatatgaataaatatttttagaattaaggtgaactgtagtgcttaatataactataatattaattgtttgaatattcaataaaaagtttaaaaaatatcaattttgatataaactgaataaatacagttgaatattaaattattattttatcaaaaatatgcaaagtactacaccttcaaatatcacctaaagtaattaaaaggcaattaaagtgaagtagttcaagtatttctaaaatgagtttaataaattctataataatttattttttgccttaaaattgccttaaaatccaaacaattttaaaactaatgtactataaaaagctggtataatttaaatatagtaaaaaataagatttatcttatctattgggatttaattatttaatcaatatatttataccatttaatttaaataaaaagtctattaaggagtgagcttatgagtaagttaatttatatagcagatgatgaagataatataagaaatttggtaaagacattcttaaaaaatgaaggtcatgatgttatggattttaaaacgggtgatgaacttttagaacaatttaatataaaggagtgtgacttagtaatactagatataatgatgcctggctcaagtggttttgaagtatgtacaaaacttcgtgagaaaagtacagtcccaataatcatgcttactgcaagagatacagatatagattatattacagggataaccttaggtagtgatgattattttacaaaaccatttagcccaatgtctttggttatgagagtaaaatctatatttagaaggatagagtttgaaaagaaacaaaattatgataaatatagtaactcgatagatatggaattaaaatttggtgatgtaataataaataaaaagaataaaatcgttacaagtaaaaatgtaaatatagaccttacaccaaatgaatataatctattgacttatttgtttgaaaatatagatagagcagtttccagagatgaattattaaacaaaatatggggatacgatatagaagttgagacaagggctgctgatgatacagtgaagagattacgtaaaaaaattttagatacaaatattttaatagaaactgtatgggggtttggatttaggttgaaggagaaaagttaagatgaataatggaaatgacaagaatagaattggaaagattaaatccaaatttaaattaaagttctcaaagaaaaatataagcataaaaactaggattttgttgagcatactttgtttgataattatagtatttatgataatattagtatcttttaatgtatttcttgatacatatataaaaacaactgcgaatgaagaattgacgaagtctacagaaatagtagaacatatggatagtaattttagacctattaagccaccacaagatgatggaaagcttcctcccaaagtattatctaattttatgagaaatgtacaagataaagttaggatggcagaaacacaatcagatgctgatgctatggtagttgattctaagtataacctgatatttccaacaagagaggatgatttcttaaaaaatgttgatgagatggagctgattagggagtgtattcaaaatgaaaaattagatttaaattcagatgaaaatacacggatatctaccagaaataaggattattatatttcaactgtaaaaattactagtatatatggtgaacaagacaaatatcttatactttttatagacatatcaaaaactctaaatctagcacaaaagataaatattgtattaatatctgtaatgtgttttgctggaatattagcaatatttacagctgtgattttatctgagaaaattgctaaaccgataaaagagttgtgtgagtttgcaaaaaaaatgggtcaaggagatttcaaaagaacctactttgacttttcagataaagaattagtagagctctcaactgttatgaataagagtgctgagtatctggataagtatgataatgaacaaaaaatattttttcaaaatgcatctcatgaattaaggacaccactcatgtctattaaaggttatgcagaagctataaaatataatgttatagatagtaaacatgcaagtgatataattcttgaagaaagtgataggttaagtgatatggttgaagatttattatacatttctaaaatagataatataactaaagattttgaacttgtagaatgtgatttaagagaagtattttcaaattgtggagctaggcaaaatgtaagagctataaataaggggataaaatttatttatgaatttgatgaagaaatggttttatttgaatgtgatgaaaaaaacatttccaaagcatttatgaatcttatagaaaatgctttgagatacgctaagagtgaaataaaaatagtgtgtaagtataatcaaaaaaatatagttgtgataatagaagatgatggaattggaatcaagaaagaagatttacctcatgtttttgaaagattctataagggagtagggggaaatcatggaattggattatcaatagttaaatctattgtaaataagcatggtgggcgtatatacgtagaaaatggcaaaaaaggagctaagtttactatattatttaaattgtaaaaaaattagagaaaatataaagatgtttgaagttgttttttatatatatctgttgtatactgttgaaaaaagaacaatattaagctgacatatattacaataattgacatttaaagtaaatgcttaaatatagatacgaaaggaaaagtaaaatctgaagtgtatttaggtttaagtaagcttcttattttataaaaaatatgtatgaaagaacagctgatttttaatattacaaatttagtaacggttgtatttgaagcttttgtcatccatatgtttttatcagactttttaggtcagaaagaagggtatataaaagttgtaagatatgctaaactgggttttataatatgtttaggattctgtaatttaataactttaaaccctaaaatcacaatgcctttaatttttatccttattttttcaacatcatttttatataaaggaaatttaaagacacgattgtttactactgttttattaagtatattctttatactgtcagaaattgtagttacaagtatttttgttttatttgtaaaagaaggctttgaaataatgcttgaaaataatagtataagagtattggcgacaattttatctaaaattgtctttttgttgacttgtaaaattatttgtctatttaaaaaagatgtacatttagatatgcccataaagtattggctccctttatttttaatacctatatttagtttatttctgtctgtttctatctttgatgtaagtaaattttttagtcttgaaagtttaaaatttctaagtttaatatctagtgttggcattttatatattaattttattgtattttatttatttaaatttattatagataaaactaaactatctatgaaatatgaaatacttgaaaaagaaataattcataaggaagaattaagacttagtaatgagtgttataaaattattgttgaacagactgattctgtcgttttcgaatggaatatcaaagaaaataaatcatttgtatcgcaggcttggactgaaaaatttggatataacaatgcatgtaagaatatttttaaagaaattaaagataaagacttagttcattctgaagataaagctatatttgaaggttttcttgaaagtattaaaaaaaagaatatacacagtcaagcagtatatcgtttaaaaaaatctaatggtgaatatatttggtgtagaacatcaattacaagcatttataatgatgaaaatgaacttttaagagttgtaggagtaattgtagacgtagatagtgatataaaaaaatatgaagagttaagaactagagcagaaagtgactcattgaccaatatatacaataaaggtacatttgaaaaattagtggaagaaactatagttatgaatacaggtgataaaaaagatgcattattcattattgatttagatgattttaaagaaataaatgataattttggtcatccatttggtgattttgtactaaaaacatttgctgataagatacaagctagttttggtaataaagacttagtcggaagaattggtggagatgaatttgttgtatatatgcaagattatgttacagaagtaaatttgcataaaaaagctaaagaattaaatagagtactttcggataattacactgatttgagttttagttttgattcttctgtcagtataggtattgcaaggtatcctcaagatggaacttcattttttgaattgtttaaaaatgcagatagagcactttatagcataaaagcatcaggtaaaaattcatattgtttatttgaagaagaactatatgtacagtgaatttgaatttagattttatgtgagagtaagatttatatatacttgtggctgtctgatttataaaatatgttactttgtatatttttatatgtttcagtaaggttaattaacataagcaaaggtgtaagtaaatttatattagtttaagtttacttacacctttataaaaataaattttgtaaatttaaacagttggttttataaggatttttatttattttaatatcttagatattcctttttgtattccttagagaaaataaataatgaaaggagtacagaaaaaattaaacatcctaatataccacttgaattaagtcttaaagcattaaagtttaaaaaagcattatttaaatcggtatccaaaagaaaaggatgctttgatttgctatatatggaaaaattaaaaatatattcataatcaaatttataaaattaatatctttccatcctaacattacatttacttagattaattattattataaaaataaaaatacaaataatagattcatttacattcttaaatgattaaagctctttaccctttaaacatgcataacatatcgttataattccagtaaataagactaaaatgcccattcctaaaattgcagtttcatcatctattactccaaatgcttttaaagtaacttatttcgctttgtataataataatttgtctctttttatattttaacttctgctgagatttgagttagatattcgttagaatctcgcacacttatatcatatagaagatattcttcataaacaaaatccccaatacgtaaattattctgattaaaaaaatttaataacttttcataagccttgtaaatagtttcataactacctttatgataagcagttacataaagtccctttggtttgattgatacaggatatttcttgtactctttattaacttttgtaaataaatatgaatatgattcaaagtctttattaattatatcttcacctttaatgattgagccaatcgtaccatagtcactcaattcatagttgtccataaagttaatacattcatataaaaaattttcttcctcatctcctaaaaactgttctttatatgtaataggtgttttgaccaagtactcttcctcatgttcttttaaagtaatagtattcgcatctatattacaggcatttttagtgaatgaaatagtagattccattagagcttgaatattatttagtttttcaatttcatttttaatatcaatggttttcttttctaaaagctcaattagtaaattaggtgttcttttgtctatataagctttaatttcttttaaaggcatttttacttccctaagtgaagaaattataccaaaaatgctaagttgatggtatgagtagtatctatatccattttctttctttaattctggtgagaaaagacctatatcatcataatggaaaagtgtttttttattgattccacaaatctttgcaaattctccagttgtaaaataattttttgaaacttgactcataattataattcctccttgactatcctgttacagtatagtttatcatagtattttgtaaaggagtgtgattatatgaaaaaattaattcattttttaaaaccatatagagttttaattgttgtagttttgatatttacgtttttacaaacacttggaactttgtatataccaacacttacagcaaatatagtaaacaatggtgtagtaaagggagatatagattatattgtaaaaacaggtttaataatgatgatagtagctggtataacagctttatcagctgtgttagtttgtaaagtatcagcaaatctttcatctggattttgtagagatattagagaagcagtatttgtaaaatcacaagatttatcaataaatgattttaataatataggtacagcatcaatgattactaggagtactagtgatattactttaataggtcagtctgtgtttatgtttattcaattggtattaccagcaccaattataactgtttctggtctattcttagcatattctatagataaagcaatgacaattattattgttgtagtaatgtttttattcatgctttcagcatttttagttggtaaaaagcttataaagttgtttaaaatgatgcaaataaagatggacaatatgaatagggtattacgtgaggtagtaactggagtaagagttataagagcttttaatagggagcattttgaaaaaaagagatttgatagaactgcaatagattattctgaaacagcaatttcaataaataaagtatttgcagtacttatgcctattgtaatgttaataatgaatttaggtatagtaagtattatttggtttggtgggatgagagtcagtaatggaaatatggagataggtcatataatggcacttattgaatattgtatcttaattttattctatttaatcatgggagtaatggtatttatgtacatacctagagcaggtgcatgtgcagatagagtaaatcagatattagatatagaacctgaaattgtagatggaaatggtcgtaaagatactgtctcagagaggggacatttagtatttaaaaatgtaacattttcatatgcacaatcagaagaacctgtgttaaataatataacatttgaagcaaaatctggagaagtaactgcaattataggaagcactggctcaggcaaatctactattgcaaatataataccacgtttttttgaaattcaatctggagaaatatctataaatggtcaggatgttaagaagattcctcaaaaagaacttagagataagattggatttgtgccacaaaaagcttttttatttagtggaacaatagaagaaaatataaggtatggaaaagaagatgcaagtattgaagaaataaagcatgctgcaagtatagctcaagctgatgaatttatttctgatatggaagacaagtatgactcatttgtagcacaaggtggaaataatttgtcaggtggtcaaaaacagagaatatccattgcaagagcgttagttagaaagcctgaagtatatgtctttgatgatagtttttctgcattagattttaaaacagataaaagacttagaaaagcgttgaaaaatgaaatcaaagattcatcagctataattatagcacaacgtataagtacaatcatggatgctaatcagattatagttttaaatgatggaaaaattgtaggtattggaaaacataaagatttacttgaaaattgtgaagtttataagcaaattgcggattcacaacttagtaaagaagaacttgcataaaatgaagaattaatctgatatttggaggtgtatgatatgagtgaaaaaagaatagatgaacaagatatagaagtacttagttttgaagatggcatgtcagcagaaaaagttaaggatgcaaaaaaaactactaagagattattaaaatatatggcaaaacaaaagtttaaaatattaattatttttatttcagtattgataagttcagcgcttacagttttagcacctatggttatgggaaaagctattgaccaactatttaatggaataaaaactgcagtccaaacaggtacaaaattcagtgtgaattttagtactatgggggggatagtatcaatacttctagggttgtacttaattagtgcagtatttatatatattcaacagtatattatgtcaggagttgcacaaaatctagttcttagcatgagaaaagatttaagtgataaactcaataaacttcctcttaagtactatgattctcataaaaagggggaaacacttagtatagtaacaaatgatttagaaaaagtagcagatagtttacaagaaggattaatgcaacttattacagcagtagttacagtagttggttctattgtaatgatgataagtataagtgtaccacttacaatagtatcagctataacattacttgtttcattgggtattactgttgtaattgcaagaaaatcacaagaaagattctctgaaaatcaaaaggcactaggagagttaaatagcaatatagaagagatatttactggtcaaatagtggttaaagcatttagtaaagaaaaggatactataagaaactttaaaatattaaatcaaaatctttataatgcaagtagaagagcacagttttcgtcatatgcaatatctccaattattagatttataaacctaattggctatgttattatagcagttgtaggtgggatatttgcatcaactggagcaatgactcttggtagtatacaagcgtttattcaatatgtaaatcaagcatcagagcctactacagaaatatcttatattgtaaatatgcttcaagcagcaatagcatctgcagagagagtttttacagttatggatgaggtggaagagataaaggatgaagaatcttcaaaggttattagcatgcctaaaggtaaagtacaatttgagcatgttaaatttggatatagtgatgattttattcttatgaaagatattaatatcaatctaaatgcaggagacaagattgcaattgttggacctacaggagctggaaagacaactcttgtaaatttacttatgagattttatgagatacaaggtggaagaattactattgatggtgttaatataaaagacttaaagcgtggagaacttagaactatgtttggtatggttcttcaagatacatggctgtttaatggaagtataaaagaaaatattgcatatagtaagtcagatgccacaatggatgaaattgtaagagcagcaaaatcagcaagagtagaccattttataaggactttaccacaagggtatgacactatattgactgaggatgcttctaatctatctcaaggtcaaaagcaacttctaacaattgccagggcaatactttcagacccatcagtattgattcttgatgaagcaacatctagtgtagatactagaacagaggtagaaattcaaaaggcaatgaataacttgatgaagggaagaactagttttgttattgcacatagattatcaactattcgagatgctgatttaatattagtaatgaaagaaggcactattattgaacaaggaagccataaggaacttattgaaaagaaaggattctatgaagaactttataatagtcaattttcaagtgaatatgatgaagaagttgtatgattatcaagttttaggcaactaaatgattgataaatattaagttaaatatagtaacatgtaaggttatatggaataagagtatttctctatttcatataaccttttttatttatcaaaataagataaaattttctttctaaattagattgaagaaagtatttatcaatataaaagtaaaataatcattattattagtgaagtaaatattgtttgccacatatatgccataaagatgcacttattttacggagatttaacaaagtagtgtaaagtatactctaaatataaaataaatcaaatagagttaaataaattgagaggtgatataaatagtgaataaaaaattgaactatagatttgaaatgaagcacaaaataactgaagcagatgtgttagctttaaaatcaagactctatccaataatgaagaaagatgaaaatgcatctaaagatggaaaatatcttattaggagtttatattttgatactcctgaagataaagcacttttagataaattaaatggcgttgcaataagagaaaagtttaggataagattttataataataactgctcttatataaggttagagaaaaaaatcaaacattacaacatgacatcaaagctatcaactaatttaaccaaaaaagaagtaataaatatactaaacaatgatattgaatttctaaaagagtcgacaaattgtttattaagagaattttatttgaaattaaaatgtgaaagattagaggcaaaaagcatagttgattacaatagagaagcttttatttatccagttggaaatgtaagagttacaatcgatagtgatattaaaacttctgtaaattcgatagatttatttaataaagatttgccgactgtttcggtaattgatgagaatatgactgtattggaggttaaatatgatgaatttataccagattttataaaggatttaattcaaattaataagactacttctacagcagtttcaaagtatgcttcaagtagattatatatttaagaataaaggctatgatttatataaagatatacataaataaggttaaaaaacaaataggttaaaaataaataaaataaaaaataaataagttaaaaataggaaggatgattttaattatgacatttaatgatatttttaaatcaagttttatagaaaacgtatcaggtttttcatttgtggacagtgctttagcactaggttcagcttttttagtaggtttgtttatatatatggtctataaaaagacttatatgggaattatgtattctcgaccattcaatgtgtcgcttgtagcacttacaatgcttacaacttttgtaatattggcggttacttcaaatgtagttttatccttaggtatggttggtgctttatctatagtaagatttagaacagcaattaaagacccaatggatttagtatttctattttggtcattgggttcaggtatagttttaggagcaggtttgattcccttagctgtcatgggttcaataattatgggattgattctaatattcttttcaaataaaacaatatctgaaactccatatatattgatggtaaattgtaataatgaagattcagaagatatagcaactgataaaattaaaaaagtatttactaaatatcaaataaaatcaaaaagtgttacaccagaaaaaggaatagaattagtgtttgaagtaagaatgaaatatggagagacaagtcttataaatgacttgagtcaagtagatggagttactaatgcagttcttgtaagctataatggtgactatgtagcatagagaggagtaatcttttatgaaagataaaaaatttacccttcttatctctattatgattatatttttatgtgctgtagttggagtttatagtacatctagcaacaaaagtgttgatttatatagtgatgtatatattgaaaaatattttaacagagacaaggttatggaagttaatatagagatagatgaaagtgacttgaaggatatgaatgaaaatgctataaaagaagaatttaaggttgcaaaagtaactgtagatggagatacatatggaaacgtaggtataagaactaaaggaaattcaagtcttacatctgtagcaaatagtgatagtgatagatacagctataagattaattttgataagtataatactagtcaaagtatggaagggcttactcaattaaatcttaataactgttactctgacccatcttatatgagagagtttttaacatatagtatttgcgaggaaatgggattagcgactccagaatttgcatatgctaaagtctctataaatggcgaatatcatggtttgtatttggcagtagaaggattaaaagagtcttatcttgaaaataattttggtaatgtaactggagacttatataagtcagatgaaggaagctcgttgcaatataaaggagatgacccagaaagttactcaaacttaatcgttgaaagtgataaaaagacagctgattggtctaaaattacaaaactattaaaatctttggatacaggtgaagatattgaaaaatatcttgatgtagattctgtccttaaaaatatagcaataaatacagctttattaaaccttgatagctatcaaggcagttttgcccataactattatttatatgagcaagatggagtattttctatgttaccatgggattttaatatgtcatttggtggatttagtggttttggtggaggtagtcaatctatagcaattgatgaacctacgacaggtaatttagaagacagacctctcatatcctcgttattaaaaaatgagacacacaaaacaaaataccataaatatctggaagagatagtaacaaaatacctagattcagactatttagagaatatgacaacaaaattgcatgacatgatagcatcatatgtaaaagaagacccaacagcattttatacttatgaagaatttgaaaaaaatataacatcttcaattgaagattctagtgataataagggatttggtaataaagggtttgacaacaataactctaataacagtgattctaataataattctaatagtgaaaataagcgctctggaaatcaaagtgataaaaaagaagttaatgctgaattaacatcaagcgtagtcaaaactaatacagataatgaaactgaaaataaaactacaaatgatagcgaaagtaagaataatacagataaagataaaagtggaaatgataataatcaaaagctagaaggtcctaggggtaaaggaggtaagtcaataccaggggttttggaagttgcagaagatatgagtaaaactataaaatctcaattaagtggagaaacttcttcgacaaagcaaaactctggtgatgaaagttcaagtggaattaaaggtagtgaaaagtttgatgaggatatgagtggtatgccagaaccacctgagggaatggatggtaaaatgccaccaggaatgggtaatatggataagggagatatgaatggtaaaaatggcaatatgaatatggatagaaatcaagataatccaagagaagctggaggttttggcaatagaggaggaggctctgtgagtaaaacaacaacatacttcaaattaattttaggtggagcttcaatgataataatgtcgattatgttagtaggtgtatcaagggtaaagagaagaagatttataaagtcaaaataagattaaaattgaatataaataattttaatactgttaagtctaaatatttacttagcagtatttttttagaaaataatgtgtttgattaataatataaggtaataaattgataaaaattaaatacagcatattaataatacataataaagtaataaaaaaactgtttaagtataataacttatatttagacagtttttttcatttataaataatataaatgaaattgaaaacatttgaaggatagaaattggttggataaatgtataaattacttcaccaaaaaataatgacaagagttgtaactaagttgtaataaaatggtagttatttagcataaaataatgtatcatagaagtatattataaaattaataaaataagatttttgtaagaaaactgctggcttttgatatttagagtgagtagttaaattatgtttaggaggggtagaatttgttgcaaaaagtattatggaaatttttaaagctagtagtcggtttatttatatgttcagttggtatagtattgacgataaattgtaaccttggattatctccctgggatgtatttcatcaaggactttcaaatcatataggaataactataggaactgcttctataattgtaggctctatagtagttattgctgatgtcgttcttggagaaaatgtaggatggggaactgtttttaacatgctactaattggattctttatggatttacttttatatagtaatttaattccagaggctgatagtttatttgtaggaataattatgttgatattaggattggttcttttgtctgttggaatggtattttatatgggaagtggtttaggaagtggacctagagatggtttgatggttgcaattcaaaagaaaacaggaaaatcacttaaattaataagaggtactatagaagttggagcattaatagtaggatttttattaggtggaaaagttggtataggaactataataagtgcatttggattggggtatttcacacaaatggtatttggcttatttaaattagattgtagtaagattaaacatagatttatagtagatgatataaaatttatcaaagtgtatatgagtggtgagaaaaaagctgctgttcaaaatatagttaagtaatttaagaataaattcaacgaaatgttaagtattttaaattaacattttatttagatggataaattgaatattaaaagaatattaaaatatgaggattgctagaacactataaaatatagatttctagcaattttttatttgttcaatgtttttttagtactagaagtcttattctctatttaatgaatgaattaatttataattagagatactaaactttatagatattaatataaacacctttaaactgtgtattttccaaagcctttaaaatgcttgtatttattctaaataaaaaaataaaaaaatgtcaaaaaaactcttgtattatatccaaattttatatataattacctatgttgtttagaaattttaaactcaatgtttagtaaacaaaatgtttagtaaaataaaacagaaactaggaggtgcaacatggatataggtgaaaagataaaaagattaagaacagaaaaacaactgacccaggaagagctagctaatagatgtgaattgtcaaagggatttatttctcaattagaaaataacttaacatcaccatccatagctacccttatagatatacttgaaatactaggtacaaatttaagggaattttttaatgaaatagatgatgaaagaatcagttttacaaaagaagatatgtttgaaactgaagatgaagatttaaaatataaattaaagtggttaattccaaattcacaaaaaaatgaaatggagccaataataataacattgtatccaggaggacagtataaagaagaaaagccacatgaaggtgaagaatttggatatgtattagcaggttcaatatatgtccatataggcgaaaagaaaaataaagtaaaaaaaggagagagtttttactttagaccaaaagcaaatcactatatatcaaacgaaggcaaaactacagcaaaagtgatttgggtaagtacgccaccatcattttagaatagaggtgtttaataattggtagaaaatataatagaattaagggatatatctaaacattatgaggaacttactgttttagataatttcaatttagatataaagaaaaatgagtttttaacattacttggaccaagtggatgtggaaaaactacaacattaaaaataatagcaggatttgagtatgctgatgatggtaaagttttatttgaaggtaaggagataaataacttgccaccatatgaaagacaagtaaacacagtatttcaaaaatatgctttatttccacacatggatgtttatgaaaatgtagcttttggattaaaaattaaaaagactccaaaagatgtaatagatgctaaagtaaaagaggttttgaaacttgttgcactagaaggttttgaaagacgacaagttgaatcattgagtggaggacaacaacagagaattgcaatagcaagagctctagtcaatgaaccaaaggtattattactagatgaaccacttggagcacttgatttaaagttaagacaagagatgcaaatagaattaaagagaatccaaaaaaaattaggaataacatttgtttttgtaactcatgaccaagaagaggctcttactatgtcagatactattgttgtaatgtataagggcaaaattcaacaaatgggaacaccacaagatatatacaatgaacctaaaaattcatttgtagctaaatttataggtgaaagtaacatatttgatggaattatgatagaagattataaagttaatttctgtaatagagattttgagtgtgttgataaaggattcgaaaaaaatgaaaatatagaagtagtaataagaccagaagatataaaaatggtaaagccagaagaaggaatgttaaaggggaaagttacatctacagtgtttaaaggagtgcattacgagatagaattgaatgaaaatggaagattgtggatacttcataataccaaaaatgctgaggttgggactgaactaggcatggatatatatccagaagatatccatataatgagaaaagagaataactaagatgaaaagaaaatcttttttagcatatccatatgtagtttggagtgcgatatttgtaataattcctttaatattagtggtattttttagttttacaaaagaatcaggtggaggttatgcctttacacttgagaattataaagaagtaattgaccctatatatatgaaagtttttgggcgttctattcttttagcaggaggagctacattaatatgccttatagttggttatccagtggcatatataatttcaaaggctcgtgtaagtagaagaggttcattaatattattgtttattcttcctatgtggatgaactttcttttaagaacatatgcatgggttgctatattaggaaaaaatggacttttaaatacatttttaggttggtttggaatacaaccattagcaattttgtatactaattttgctatacttttaggtatggtgtataactttttaccatttatggttcttccaatatatacagcactatcaaagatggataatgatttgataaacgctgctcatgacttgggtgcaaataatatgacagtttttagaaaaattatatttcctttgagtttgccaggtgtaatgtctggaataactatggtatttatgccagcagtcactacttttgcaatatcaagactgttaggtggaggtaaaataatgctggttggagatttgattgaacaacagtttacagttgttggagattggaactttggttcagctatatcgatatttatgatgatagtaatattaatatctatgtctataatgtcaaaatttggagatgaatctgacaaagaaggcggtgggttactattttaaaattaaagaaaataacttctaatatatatttagcattagtattcttatttttgtatgcacccatatttgctttggtactattttctttcaatgattcaaaatcaatggcaagatggaatggatttacatggaagtggtatggtcaattacttcaaaatgagagtataatgagtgctttatattatactattgtaatagctatattagcgtctgtaatatctacaatagtaggaactataagtgctataggaatacataagatgagaggtaagagtaagaaattaatactaaatgtaaactatcttcctattttaaatacagagatagttacagcagtagctcttatgagcctgtttgtatttgtaaaaatggaatttggatttacaacaatgctattggcacatataatgttttgtttgccatacgttatactttcagttttgccaaaaatgaagcaattacctgataatatagaagatgcagctatggacttgggagcaacacctatatacgctcttagaaaagtaattttaccacaaataaaaccaggtatagtttctggatttttaattgcatttactatgtcaatagatgactttataataagtttctttaatgctggaaatggtgtaagcaatctttctatagaaatctatggaatggctagaagaggtataaaacctgaaataaatgcattatcaacaataatgtttgcagtggttctaggtttacttttactagctaataaaaaagaatctatagtaagggggattaaataatgattaagtttaaaaaaacaatatcccttatagctgtaggtatgatgacagttactttatttacaggatgtaataaagcaactgattctacaaaagttttaaatgtatataatgttggagattatatagatgagtctcttatagataagtttgaaaaagaaacaggaatagatgttcaatattcaacttatgatactaatgaaatgatgtatcaaaaagtaaagagtggtagtacacactatgatttagtatttccttcagactatatggtagagaaaatgaaaaatgaaggtcttttggaaaaattagattttaagaatatacctaatatgaaatatttagataagagttttttaaatcctgtatacgacaaaactaatgaatatagtgttgcatatatgtggggaactcttggaatattgtacaataagaaagaagttaaagaccctatggatagctggaatatactttggaatccaaagtataagggaaatataatgatgtttgactctgttagagatactatagggataactcttaaaaaattaggatatagcatgaatagtgtaaatccaaaagaaataaatgaagctaaaaatcttttaatgaaacaaaaggatttagtattggcttatgtaaatgatgaaggtaaggatagattgcttggtggagaagtggcaatgggtatgctgtattctggagatgcagttacgctaatggagcaaaatcctgaccttgattatgctatacctaaagagggaactaataaatgggtagatgctatgtgtgtacctacaacagcacaaaataagaaagaagctgagctgtttataaactttttattagacccagagaatgcaaaagtaaatgctgagtacattgggtattcaacacctaatacaggagcactaaaattattagacccagaaataactcagaatcctgttgcatatccatctaaagaagtacttgataaatgtgaaacttttgaagatattggtgaaaatataaaattatatgacaaggcttggatagagttaaaatcaaaatagggtcttgttggtttaagtaaatttacttaataaatacttaataaaactgttcttttttagaaaatttattttctaattattgaacagttttattttttgtttaggtcatgtttttattttgagtttatttttatgagaatttaaagtacagtaagtttcattgattactatttttataataataactataaagaggttgtctcgaaattgagataagcctctttttcattgttgaaatgatgaaaacatgtttgatttcataaaaaaagagtgattcatgagctaaagaatttgctttgagacagtattttttattaagttatattcatatgcaatttaaatagtttattaataaatgaaaacttatttgtataatgattttaataataattagaaaaaatgggcaacttaatagaataattggaggtgtaaatttataaaaaatgaataggataaataaaaaaatagatttattaatattggctttgctcgtttttatatttttaattgttggaatagtaatactatcgattaggacagaaaataaattgaatgtgttcataatgttagcaataattttttttataataatgttaacttatttatcaaattcagtagtggggttgataacaagttcaataattatatttatgtatacatcctatattttatataacaatattactcacaatatggatgttgaatttatatcatatatgtggataatagcaacaccagtatcttcaattataatgggtaatctgaacaaaagcataaatgaattgcaaaatacaaataaaaaactatctgaacagtataaggaattagtgactattgatagtgaaactggacttagaaatttaaagattttttataatgatgtaaatatggagataagtaaatctattagacataatactgatttttctcttatgatagtaaaattaccatactacggaaacctacagactatatttggtgaaaacaaaactaataaaatagtaaaatatattggttcaaatattatagaatgtacaagaaatgaagatataatttatagtttacaaaaagatatgatagggatactaatgccaaatacatctttggaaggttcgaaagttgttaaagacagaataaagaaaaggataaaagaattaaatttagatttaaacaataggggaaaatatgtaaatatagatgtcaaaattgcatttttacaatataagagtagttttggagatagtataaattttaagaatatagttgaagaggaacttcaatatgatgtttaaaatatttaataaaagtttattaaaattagtaattgtattatcaatagtactgacaatatcaaattttagcttattttcatatgcatcagaaattacttccagcacagataaggtattaatcatatatgattctaagaaagaaacagcttataatagagatattttaaatattatgagaactctattgggaagatttagttcagatatagagctattaaaattgagtaactatgatggtgagataaatgaaaattattacagtcatatatttattttaggaatcaatgaaaactcatataataatgataaaaacactaaaaacttgattagttccttaaattcatataaagtaactatatgttggttaggatatggtatagaaaatcttttggaacataaaaaatacaatttagactatgtaggaaaaacaaacaatatagttagtgtaaattatagaggtaaatcatataacttggatgaacattatgtttttaacattgtagaatcaaaagatacaagtaataaagtaataggaagtattaatgataccttaaataagtatccatatataataaatgataaaaatcttttttatgtatcaaaattagatttagatggagttttattttatatattttgcgattcacttaatgatatttttaatattaagacgtttgataaaggacgtatatttgtaagaatagaagatgtacatgcttttagagaaccaaaaaatcttgtagagatagcggattatttaagtagtaagaatataccatttacgattgcattaataccagcatatgtaaatcctaaaaatcataaagtaataactttatcagaaagccctgaaattgtcaaagcaataaaatatatgcaagataaaggtggaactgtgatattgcatggatatactcatcaatacaagaaagaagaagtttctggagaagggtatgaattttgggatggtaaaaaagatgaacccttaaaagaaaatatgaagatatttgtcaaagatagagttttgaatggtcttagagtatgtatagagaatggaatttatcctcttgcatttgaagcgccacattatgcaatggaatcagagggatataaagaattaaaaaaatatttttctacttatatggggcaacatcaaaataatgataaaaaatttagcacaaatacatatccttatattattagggatacagaggagtttaatatatttatacccgaaaatttaggatatatagacccagaagacaagtttacttttcaaaatataaaagaaaatttagataaattatctattgtaagaggttttagtggagggttcttctttcattcatatttaaacatagagtatctaaaaaacacaatagaatatttagaaaaacagaatatagaatttatgaatttaagagattttaataattgggtaaaagttgatgaaatacaaataagaaataatggagatgaaattatagtcaactatgataaggacttagatgaaataactaaaagtgatactagatttaaatacatatccaatattagtaaaattttaatattcatagtatctataagtgttttaatatttgtgattatatttatatattttaagagaatagataaaaagaaatttttaaaataaatgattttatattagaatcaatattttaaaatattttaggagaaatttatgagagatttaaatgtatcagagtatttgttcgtatttagtctgtttagtatatggtctttattgcttataaatattattttagctatgggtggatatatattttattttaaaaactttgataaagaaataaaagaaattgatgaatatcctatgatatcaatacttgttcctgctcataatgaagctaaagtgataggtagaactgtggagtctttgttattactcaattatcctaagagtaagatggaacttattgttataaatgacaattcttctgataatagtaaagaaattttagaaaatataaaggataggtacaacaattataatttcactataataaatacagatagtttaacaggtggaaaaggaaagtctaatgcattaaatattggatataaggtttcaaaaggagattttatagctgtttatgatgcagataacacaccagataaaaatgcacttagatatctagtacaaactatagtaatgaatgatgaattaggtgctgttattgggaaatttaggactcgaaataaaaataaaaacctattaaccaaatttataaacatagaaacattaagctttcaatggatgtcacaagctggtagatggcaactttttaatctatgtacaataccaggaactaactttatattgaggagaagtatcatagaagaaattgaaggatgggatagtaaagcaattgcagaagatacagaaataagttttaggatatataaattgggatacaagataaagcttgtaccacaatctataacatgggaacaagagccagaaactgttaaggtgtggataaagcaacgtactagatgggcaaaagggaatatatatgtattaatgaaatatataaaaaatatatttaaacagggaagaaataagattgtgtttgatatagcttactttttttctgtatattttctatttttaacaactgtaattatatccgatattttatgtgttttaagtatatctaaactagtagaaatttctattccaattaacttttttctaatatggatactatcttatcttttatttattatagaagtgagtataagccttactatagaaaaaggtgaagcaacaattgaaaatatattcatagttgcaataatgtattttacatactctcaactatggctgtttgtagctataaaagggatgatagagtatctaaaagatataatttttaaaagagaggttaaatggtataaaacagaaagattttgattcatgtacaggaggaattaacatgaaaaaatttattatatcaattatatctttagtattgtttttttcaaatatatcacttatatacaaagtaaatgctgatgagactaaagttaaaaattataagtttgaaagagatataactattgatggtgttataggaagtaatagtactttttttgaagtaaataaaaattgggatattgaagaagttttattgcatcttaattttagtaagagccaaatattaaatggagatgtttcaagtttaactgtattgataaataatgtaccaataaaatctattaaattaaatgctaagacaaattataaaaatacattagaagtattagttccaaaagattatataattcaaggatataatgaaataaaaataaaaacatacaaaacaatatctgataaaatttgccaagatgattccaatactgggaactggatggttattcacaaagaatcatatatatcaattagatataagcagaaaaaggtggaaaactcaataaatgaatatccgtatccatatgcagaaattgaaaataatcataaattagatacaactatagtagtaccagataatatgactagaggagagactacagcagtgtttaatttggcatcatcatttggaaaaataacaaaaaatgatgatttaaagttagatgttaaattatattcagaaatgaaaaattggtcagatgataatattatatatattggtaaacctgaaaatacagcagaagaaattttggatattttaagtataaaggaacaaaccctattatcttcaaactgtataatcaagcaagtagattcaccatacaataagaataagaagatgatggtggtaattggtagtaatgaagatgatttaataaaggcatcaaatttattaatagaaaatagactttctaaccaagttttatcatcatcagtgcttgtaaacaaagagactaatataaaaattaatagggaacaaaaattaaatttaggtcatttaacattaaaagacttaggatattctgactttttgttggaaggagcatttaatcaacaagctttgtttgatgtcaaaataccaacgggtaaggtattagatgatggttcaaagattatcttaaatttaagatattctgacaatttagattttgaaaaatctttagttacagtgtctataaatgatgttattgtgggaagtaaaaaattggataggtcacattctaataatgataagttagaattaaaaatacctaaagatatagataataaaaactattatcaagttaaattgacatttaatttgagtataaaaaattcgaattgtgttactagagagagtaataatccttgggcatatgtatcaaataattcttatttggcgttatctacgaaagaaaatgaaaccttatcttttgaaaattatccgtatccatttgttagagatgatgagtttaatgatttaactgtgataatgccagattattcagggtcacaagctatgacctggatgtttagattaggtgttactttaggtacgaatataaattcacataatggaaatataaatgtaattagaggaaaagaatttagtgacaagtataaggatactaatattgtagtttttggagtgccacataataattctgttataaagatgttaaataataatttaaatataaagttcgataaaaattactccaattttatatcaaatgataagataagctttattgatgattatggaaaaaatatttctaccattcaattaataaaatcaccatataataatcaaaaaaatatcatggtaattagttcaatgaatgaaaaaaacttatatttaggaatggattatttgttgaataaaagtaaagttaatgatttaaaaggagatacattgataattgatgaatacggagaggtagaagatttagcttataatttaaaacctaagaaagaagtaaaagattcaagctggaatatgagtataaataagacaactaaagtatttttaatgatttcttttattactataattgtagtcatgatattatcaatgctatatataaaaaaatataaaagaagataatatgataaatttattattttaaaagaggtatataatttgaggaaatatatgaataaatttaaattaaaaagaagcattttaatctcattaataatcttaatttttatatttatagtgtactttgtaagtattgagttaaaagatgggagtctagtaaataatcaatataaaggtaagattaaatcggccaatttatctgtagattatgaaataaatcaagttatgaaggatatagataaattgggattgaatacagtaaatgtacctataattataaatgtagagtccattaattctgatattatgtcaatagataataatagtaaagaaaaggcaattaagttaataaaaaaattaaataaaaaaggtatttcaacaatattagaggcatatccatgggttgaaaatggaaaattgtatgagactgactggaaccctataaataaaaaaagatttttttatacttggcaaaatgccatattaaatgaacttataattgatgtagcaaatccactggatgtaaatgttttaaatattggttctaattttgtacatttggaagaatatcaacaaaattggggtgaaataatagattttgtacaatccaaatttgatggtcttgtaacgtacagaactaattggtggtatacaaaaaaagatgattcaagtagtaagttgttttatgaacaaaaattgaacaataatttttttgataagttagattttatatctatagcagcatattttgagttaagtaataaacctgttaatacagtggatgaattaatttctgccttacactcatctactgtaaacaatagaggacaaaatataaaacaagaaatatataacctttataaagctcatagaaaacctatattttttggagaattaggtttttcaaatagagaaagtgcaagttctcagccgtggaatcatactccttcaaaagctgtaaatggcgaagaacaagcaaggtgttttgaggcatataagaaagtttttgaaaatgaagactggataaatggtttttctgtgttttgtgtaggtaaaatagatgacgaaaaaaatttttacccatcaaaagagagtataaaagttattaagtcttggtatgaataattttaaaagtgtagaatttatatagattaaatagatgattaggagagatataaatgaatgacatcaaggttatgactgtatttggaactagacctgaagctatcaaagtagcacctttaataaaggaacttgaaaaaagagagaatataaaaagtattgtttgcgttacagctcaacatagagaaatgcttgaccaagttatagaaaccttcaatataaatgtagactatgatttggatataatggaaaaaggacaaagcctgaatgatataacatgtaagattttaaataaacttcccttgattttaaacaaggaaaatccaaatataatattggtacatggagatacaaccacaactctagctacaagtttgactgcattttataataaagctcttgttggtcatatagaagctgggcttagaacctatgataaatattctccttttccagaggagttaaatagacaacttacaggtattattgctgatatgcactttgctcctactaatttggctagaaaaaacttgatttctgaaggaaaacctaataataatatatttgtaactggtaatactgctattgatgctttaaagatgacaataaaagaaaactataatcatcctataattgatgagattggtaacgataggatgattttgttaacctctcacagaagagaaaatttgggtaaacctatgaaaaatatattcagagctataaagcgaatagtagatgattttgaagatgtacagatagtatatcccatacatttaaatcctaaaatacgaactatagctgatgagatatttggaaaatttcctgaaaaaattcatattatagagcctttagatgtagctgattttcataactttttaaataaatcttatatgataatgactgatagtggaggaatacaggaagaagctccatcattaggtaagccagtccttgtgttgcgtgataaaacagaaagaacagaaggaattgaagcaaagacacttaaattagtaggtactaatgaagatagaatatataattcagtgagcgatttattaataaataaagatagctatgttcagatgagtaaagcatctaatccatatggagatggaaatgcaagcaaatatatagtggatataataattaaaaaatttaattgcaagtatttaaattagataaggtctaaaacattaactaattgatataagatttatgataatattaaggaatacaatttttaagggggagtaatatggctagaaaattaataaaaaatttaggtaaaagtaaaagtgtaaagagagtgaaacttttatttaagaagatttttattactgtattcatagtagcaagtatagttgctatttttaatataacgaaatattttgaggaattatacaaagtaagggatttaaaaagtactaaaattgaatactatatggatgtggctgatgaagcaggagatggaaaggtccaattaagttggaaggccttacttgctatagacatggtaatacatgatgaagatttaagtaatataaaaaagaaagacacattggatataggggaaaagtttatagtagaagataaaaatgataaaggcgaaaaggtgtataaggtaaaaaagtttaataaggtattaagcgaattgaaatttgactcttctcaaaaaagtagagcaagaaaatacatgaaagatttggaatacacataccttggaaataaacaattagatagtagtgatgaaaaaattaaatttataaagaagttagaagactcagctataagagaatatattgattatggaatattgccctctgtaacaattggacaagctatattagaatctggctggggaaattctaaacttacaaaacagagtaataatttatttggtataaaagcagataaagcatggaaaggaaaaagtgtagaaatttcaacttcagagcattataatgaaaaaattgtagctagttttaggtcgtataattcattacaagattctgtcaaagaccacagtttatttttaattaataataaaagatatagaaaacatgggttgtttgaggcaaaagattatattagtcaagctcaagcattagaaaatgcaggatatagtacagcagaagataaaaaaggaaatcgtatatatgcagagctattaatagatattattaggagttataatttgcaattgatagacaataaagttgagacaaaataattgttaactttatatgaggagataacaagataagattcttttctacaaaaagaatagaaaaattgtaaaaaaaactaaaaaaatgtattgacttgttatttaaaaggtgatattattattactgtactcgaaagagaacaaaatgaactttgaaaattaaacagtaggttaatttataaacaagaaacaaaccataaagccagatattttgataacaatagtatctgagcctgataaacttttatttgagagtttgatcctggctcaggatgaacgctggcggcgtgcctaacacatgcaagttgagcgatttacttcggtaaagagcggcggacgggtgagtaacgcgtgggtaacctaccctgtacacacggataacataccgaaaggtatgctaatacgggataatatatttgagaggcatctcttgaatatcaaaggtgagccagtacaggatggacccgcgtctgattagctagttggtaaggtaacggcttaccaaggcgacgatcagtagccgacctgagagggtgatcggccacattggaactgagacacggtccaaactcctacgggaggcagcagtggggaatattgcacaatgggcgaaagcctgatgcagcaacgccgcgtgagtgatgaaggccttcgggtcgtaaaactctgtcctcaaggaagataatgacggtacttgaggaggaagccccggctaactacgtgccagcagccgcggtaatacgtagggggctagcgttatccggatttactgggcgtaaagggtgcgtaggcggtctttcaagtcaggagtgaaaggctacggctcaaccgtagtaagctcttgaaactgggagacttgagtgcaggagaggagagtggaattcctagtgtagcggtgaaatgcgtagatattaggaggaacaccagttgcgaaggcggctctctggactgtaactgacgctgaggcacgaaagcgtggggagcaaacaggattagataccctggtagtccacgctgtaaacgatgagtactaggtgtcgggggttacccccttcggtgccgcagctaacgcattaagtactccgcctgggaagtacgctcgcaagagtgaaactcaaaggaattgacggggacccgcacaagtagcggagcatgtggtttaattcgaagcaacgcgaagaaccttacctaagcttgacatcccaatgacatctccttaatcggagagttcccttcggggacattggtgacaggtggtgcatggttgtcgtcagctcgtgtcgtgagatgttgggttaagtcccgcaacgagcgcaacccttgtctttagttgccatcattaagttgggcactctagagagactgccagggataacctggaggaaggtggggatgacgtcaaatcatcatgccccttatgcttagggctacacacgtgctacaatgggtagtacagagggttgccaagccgtaaggtggagctaatcccttaaagctactctcagttcggattgtaggctgaaactcgcctacatgaagctggagttactagtaatcgcagatcagaatgctgcggtgaatgcgttcccgggtcttgtacacaccgcccgtcacaccacgggagttggagacgcccgaagccgattatctaaccttttggaagaagtcgtcgaaggtggaatcaataactggggtgaagtcgtaacaaggtagccgtatcggaaggtgcggctggatcacctcctttctaaggagaattacctactgtttaattttgagggttcgtttttacgaatactcaaaattagcactttaagcaacagaataaactgaacgcatgtgaagtttgtttgttggcgctgtgcgttagcactttaagcaacgggatttatccgttggcgctgtgcgttagcactttaagcaacggaatttattcgttggcgacgtgctttagcactttgaaaactgcatatatatttagtgatatgacatctaatttgtaatatataaagctgataacttttaaaaattatcaagttgatagactttaatctatcaaacctttttaactggtcaagttattaagggtgcagggcggatgccttggcactaggagccgatgaaggacgtgataagctgcgataagcttcggggagttgcacgtaaactttgatccgaagatttccgaatgaggaaactcacttagagtaatgtctaagtatcattaagtgaatacatagcttaatgaggggaactcagggaactgaaacatctaagtacctgaaggaagagaaagaaattcgattccgtaagtagcggcgagcgaacgcggattagcccaaaccaataaagttttctttattggggttgcggacatatcataacgaagaggtatcgtaattgaagaggtttggaaagacccaccacagaaggtaatagtcctgtatgttaaacgagaagacttcagatatgatccagagtaccacgggacacgtgaaaccctgtgggaagcaggagggaccaccctccaaggctaaatactacctagtgaccgatagcgtatagtaccgtgagggaaaggtgaaaagaaccccgggaggggagtgaaatagaacctgaaaccctgcacttacaagctgtggaagcacatttcttgtgtgaccgcgtactttttgtagaacgggccaacgagttacgttaagtagcaaggttaagcacttaaggtgcggagccgtagcgaaagcgagttttaactgagcgttcagttacttgacgtagacccgaaaccgggcgacctacccatgagcaggatgaagcgaaagtaaaatttcgtggaggtccgaacccacgagcgttgaaaagctcggggatgacttgtgggtagcggtgaaattccaatcgagcccggagatagctggttctccccgaaatagctttagggctagcctcaaggtgagagatacggaggtagagcactgaatgtcctagggggtattgcacctaccgaagactatcaaactccgaatgccgtcatcttatacttgggagtcagactgtgggtgataagattcatagtcgaaagggcaacagcccagatcgtcagctaaggtccctaaatgtaagttaagtggtaaaggatgtgggattgcacagacaaccaggatgttggcttagaagcagccactcattcaaagagtgcgtaatagctcactggtcgagtgatcctgcgccgaagatttccggggctaaaacttactaccgaagctacggcatcagtaatgatgggtaggggagcttcccatacgggttgaagcatgaccgtaaggacatgtggacagtatgggagtgagaatgttggcatgagtagcgagatgtgggtgagaatcccacaggccgtaaacccaaggtttccaggggaaggttcgtccgccctgggttagtcgggacctaagctgaggccgaaaggcgtaggtgatggacaacaggttgatattcctgtactaccgataaccgtttgagagaagggatgacacagtaggataagctaagcacactgttggttatgtgtgcccaagcattgaggcagtcaaagtaggcaaatccgctttgataatgctgggatgtgatggggagcgaaatttagtagcgaagtagctgatttcacactgtcaagaaaagtctctatcgaggttaaaggtacccgtaccgcaaaccgacacaggtgggtgaggagagtatcctaaggccagcgagagaactgttgttaaggaactcggcaaaatgaccccgtaacttagggataaggggtgccaccatcaggtggccgcagagaataggcccaagcgactgtttaccaaaaacataggtttctgctaagtcgcaagacgatgtataggagctgacgcctgcccggtgctggaaggttaaggggatctgttagagcaatcgaagcagtgaacttaagccccagtaaacggcggccgtaactataacggtcctaaggtagcgaaattccttgtcgggtaagttccgacccgcacgaaaggcgtaacgatttgggcactgtctcaacaacagactcggtgaaattgtaattccggtgaagatgccggatacctgcgacaggacggaaagaccccatggagctttactgtagcttgacattgggtcttggtactacatgtacaggataggtgggaggctttgaaaccaggacgccagttttggcggagccatccttgggataccacccttgtagtactgggactctaaccataggccatgaatctggtcttgggacactgtcaggtgggcagtttgactggggcggtcgcctcccaaaaggtaacggaggcgctcaaaggttctctcagtacggtcggaaatcgtacgtagagtgtaaaggcaaaagagagcttgattgcaagacatacaggtcgagcaaggatgaaaatcggacttagtgatccggtggttctgcgtggaagggccatcgctcaacggataaaagctaccctggggataacaggcttatctcccccaagagtccacatcgacggggaggtttggcacctcgatgtcggctcatcacatcctggggctgtagtaggtcccaagggttgggctgttcgcccattaaagtggtacgcgagctgggttcagaacgtcgtgagacagttcggtccctatccgtcgcaggcgtaggaaatttgagaagacctgtccttagtacgagaggaccgggatggacgtacctctggtgtaccagttgtcctgccaagggcatggctgggtagctatgtacggaatggataagcgctgaaagcatctaagcgcgaagccaacttcaagataagatttcccaccgcaagggtaagaccccagaaagactatctggttgataggtcgaaggtgtaagtgcagcaatgtatttagcttatcgatactaataggtcgaggacttgaccaatatttatttgatgttcattcattaggatatatatgtagtttttagggtgctaactctaaaaaattagttttactaatttataaaaatttaatgcgggtgtagctcaatggtagagttctggccttccaagccagctgtgagggttcgatccccttcacccgctccaaaagattatgtggttacaatagcagagaggatacacctgttcccattccgaacacagaagttaagctctctagtgctgatggtacttggtgggaaactgcctgggagagtaggacgtagccacgtaatctttttttgttgtattaaatttaataaacctacaattgttatatgtttttatttgtcttttatagatttttttggcaataaatgatatagtgaagataattaaatatattcaatatatttaatttttttattttttgtttttataatttttttagaagtttattttttatgtaattatttataattttgggtaaaaacactttgatataatttcaaaaattaaaaggttaaaaaacaaagtagaaatttatgttaaataaggagattaatatgagaagaaatacaaaattattaacaacagggattctttcaatggcaatcgtcgcacctacaatggcatttgctactgaatctaatgctatggaaaataacgctgatttaaatataaacttagagaaaaaaagtatcgttttaggtagcaaatcaaaagtcagtgtcaagtttaaagaaaaaccagatgcagatagcattacattaaagtataaatgctatgatatgccattggatacaactctaaattataatcaatcaactgagtcatatgaaggaactatcaattataataaagacccagaatatttaaatgtttgggaactacaagggataacaataaacagcaaaaataatcctaaaactttaaacaaacaagaactagaaaagatgggattaaatttaaaagactataatgtaacgcaggaatgtataattgaagatataacttctagaaaagatgtaaataaatatttaagaaaaacttctgcacctattacagaacttacaggaagtgatagatacgaaacagcagttaaaataagtaaagaaggctggaaaaatggttcagataaggtagttataataaatggggatgtaagtatagatggcattatatcaactccactagcaactacatataatgctccaatacttttggttgaaaaaaataatgtacctaatagtgtaaaatcagaattaaagcgtttaaatcctagagatgtaattataattggagatgagaatgctatttctaaaactactgctaatcaaattaaatcgactgtaaatgctagtcaaacacgtctaaagggctctaatagatatgagacatctttattgatagcaaaggaaatagataaaaatcatgatgtggaaaaagtatacataacaaatgctaatggcggagaagtggatgcacttactatagcagcaaaagcaggtcaagacaagcaaccaattatattaactgataaaaatagtattacagacaacacatataaatggttaaagagtgaggatttacaaaatgcttattttataggtggacctcaaatgatatcaacaaatgttataaataaggtaaatgatataactaaagataatgttactaataatagagtatatggagcagatagacacgaaacaaatgcaaacgtaataaaaaaattctatacagatgatgagttagaggctgttttagtagctaaatcagatgtacttgttgatgctttagcagcaggtccattggctgcgaacttaaaatctccaatacttataacaccaaagacgtatgtatctgcataccataaagataatttagaagctaaatcagctaataaagtatataaaataggaggaggattgacttctaaggtaatgaactctatagcatcatcattatctaaacacaatacaactccaacagaaccaggaaatagtgggggtaagacagttatgattgacccaggacatggtggttcggacactggaacaacaggtaaaccattagggggtattaaagaaaaagactatacattaaatacttcacttgcgacaactgaatatttacgttcaaagggattcaatgtaataatgacaagagacacagataagactttatctcttggaaatagaactgctttatctaactctttgagaccagatttatttacgagtatacactataatgcatctgatacaactgggaatggtgtagaagtattttataagcttaaagataaagatggagggactactaaaactgtagctacaaatatattaaatagaatcttagagaaatttaatctaaaaaatagaggtgcaaaaacaagaacactatcaactgaccctacaaaagattatttatatgttttaagaaataatgatatgccagctgtacttgtagaatgtgcatttttggataatgagaaagatatgagtttacttaatacatcaaataaagtaaaagaaatgggtacacaaataggtaaaggcatagaagattcattaaaatagtctacaatgagagcatagaaaaatttaaaataaattaatctgcaattttaaatttaaactaaagctataagataagaatgtaattataatagtaataaagactgtatatacattgtgcatataagtgcgaaatgaggtatatacagtctttttatgattaattgtaaaaggatttatattatatgaagaatttacatatcttaaggctacagttaattgtcaagagttggagtattcatttgtaatacacaataaaagcttaattactatattttattgtgtgtttgtgtgtttgtgtgttttttgtggatttttatgtcaataaatgatatagtatagataattaaatgtattaaatatatttaatttttttattttttgagttttataagtttatttttatatattacttatatattatttatattttgggttagatacactttgacatattttcaaaagttaaaagattaaaaataaagtagaaatttatgttaagtaaggagattaatatgagaagaaatacaaaattattaacaacagggattctttcaatggcaatcgtcgcacctacaatggcatttgctactgaatctaatgctatggaaaataacgctgatttaaatataaacttagagaaaaaaagtatcgttttaggtagcaaatcaaaagttagtgtcaaatttaaagaaaaaccagatgcagatagcattacattaaagtataaatgctatgacatgccattggatacaactctaaattacaatcaatcaactggggcatatgaaggaactatcaattataaccaagacccagaatatctaaatgtttgggaactacaagggataacaataaacagcaaaaataatcctaaaactttaaacggacaagacctagaaaagatgggattaaatttaaaagactataatgtaacacaggaatgtataattgaagacataacttctagaaaagatgtaaataaatatttgagaaaaacttctgcacctattacagaacttacaggaagtgatagatatgaaacagcagttaaaataagtaaagagggctggaaaaatggttcagataaagtagttataataaatggagatgtaagtatagatggcattatatcaactccgctggcaaccacatataatgctccaatacttttggttgaaaaaaacaatgtgcctaatagtgtaaaatcagaattaaagcgcctaaaccctaaagatataattataattggagatgagaatgctatttctaaaactactgctaatcaaattaaatcgactgtaaatgctagtcaaacacgtttaaatggttctaatagatatgagacatctttattgatagcaaaggaaatagataaaaatcatgatgtggaaaaagtatacataacaaatgctaatggcggagaagtggatgcacttactatagcagcaaaagcaggtcaagacaagcaaccaattatattaactgataaagatagtattacagacaatacatataaatggttaaagagtgaggatttacaaaatgcttattttataggtggtcctcaaatgatatcaacaaatgttataaataaggtaaatggaataactaaggatagtgttactaataatagagtatacggagcagatagacacgaaacaaatgcaaatgtaataaaaaaattctatacagaggatgagatagaggctgttttagtagctaaatcagatgtacttgttgatgctttagcagcaggtccattggctgcgaacttaaaatctccaatacttataacaccaaagacgtatgtatctgcataccataaagataatttagaagctaaatcagctaataaagtatacaaaataggtggaggattgacttctaaggtaatgagctctatagcatcatcattatctaaacacaatacgactccaacagaaccaggaaatagtgggggcaagacagttatgattgacccagggcatggtggttcagcacctggaaattcatctggaggaatgattgaaaaagattacaatttaaatacttcacttgcaacaactgaatatttacgttcaaagggattcaatgtaataatgacaagagacacagataagactttatctcttggaaatagaactgctctatctaattcattgaaaccagatttatttacaagtatacattataatggctcaactaataaacaaggtcatggtgtagaagtattttataagcttaaagataaaaatggggggactactaaaactgtagctaccaatatattaaatagaattttagagaaatttaaacttacaaatagaggtataaaaacaagagtacttcctagtgattctacaaaagattatttatacgttttaagaagtaatgatatgccagctgtacttgtagaatgtgcatttttggataatgaaaatgatatgagtttaataaactcatctgcaaaagtaaaagaaatgggtacacaaataggtaaaggaatagaagattcattaaaataaatggaaataaaaatatttaaaaacttaatgtaaatttatactaaagtcaaaaaatgaaatataagtgtatcaatagtaagactgtatgtacatttgcacatgtgaatgcaagtatatatacagtctttttttgtagttaaatgcaataatttgattgtgttttgtaaaatacacaatatgatataattagataatatacacttaatttaattgaggaaggtgattatatggaatatttatttgaaaaaagtagtttaaaagaatatggaaatgaagctttagataaatatagagaattattagataaaactgataataattcaaggtgtattcttttattagtaccaaacaataacacaaagatacgatatgaaagggctctaagattaaattatagtgaagaactgaaaataacaacatatataagttttgtgaagaaagaattagttaaatactggccactaataatagaaaaatgtgatgaaataaatacaaaggttgtatctccaacatttatatcaaatagtttaagtgaatatttaatagtgcaaaaagttaaggaaaaaaggatacaagaaggatattttgaagatattacaggaaccaataaatccatagcaaatagtataatgactaacataaataaatctgcatttaatttaattgattttgattttattggagaaaaaatatattcatcaaagaaaaataaagatagtatatatagattttcatacactcagatggatgaaattatatcatattatataaattcgttactatcaaattcaattttagataatgcattaagcatatatttatacaatcaatacctacttaatgatgatttttatttaaaaaacttatttacagaagtgagatatataattgtggatagtcttgaaagctcaagtaatgcagaagttgattttataacagaagcattggataatacattacaaagttatatatattttgattatagtagggattattctgtatttaataatgtggatatagactatataaatgagaaaataatatcaaaaattaagcctaaagaagaaaatattaaaaagaaggagattagaatagaagatttatacttattacctgcaaatatagaattaaatcaatcaagtcaattatacaatgaaatgttagatttaataagtgaaaaagttatatctcttatagaagaaaatgtatctccaagagatatagcaattatatctcctataaacaatagtatattggagcatcaaattagagattctttgatagaaaaaaatatagatgtttttagtactaagaaggataaaaaagctgtagattatccatatgggaatgcattggtagtggctacatgtatattttatggatatttagattttataaaagatgatgaatacttaagctttttagaaactcttttagaaataaataggataaaagcatttaagatttttaatgaaacaagacatttaagtattgataatatagatgaacatagtcagtatcgtgatattttacagtatattgaagaaaaaaagaagagtgatataaaaatacatgaatttttaactcaattttacatagataaaatgttaaatttaaaagaaggtaaaaagaatgttgggttatgtaaaaagataatagctgaaagtgagtcttttagtgaaagtttaagtctacttaggatgaaaaaagaaaagatatttatagaagctttaaaaagtacaataaacgattattactctgttgtcgatatagaagagttgaaatccaaagacaaaatagtaataactactccttattcatatatatcatcaaatatagatagaagtatacaaatatgggtagatataggaagtaatgcttggaatatgaaaatagaaaaagatataagtaatttaattgtacttagaaaatcttttgaagaaaaaaagatttatacaaatgaaatggaagaatattataaaaaatattatctatacaatacagtatataatttgttattaaatgcaaagaaaatctatgcatttaaaagtgaatatgcgattaatggttatatccaagagagtatattatatagtatacttttaaaaatctcacataaaggagataaaaattatgattaatataaattatagagaagaccagataccaataataaattacgataatggtactatggcagtaccagcagtaccaggtgctggaaaaacatttataataacaaatttagtagctaaactattacttgaacagaaacataagggtggtaaaatattaattcttacatatatgaatagtgctgtaaataattttaaaggtagaataagaaagattcttgaagagaataaaatagatgatactaattcgtatgaagtaatgactatacacagtttggctgtaaaaataataaaggaaaagccagaagttgtaatgttaagtgaggattttaacatagctgacgatttgcaaaaaagtattatattaaatgaatgtataagtagatttagatttgaaggtggagaaagagcttttagatggtttttaaaggagcaaaaagatgaacgctggaaagaaatagctcttgaagcctgggaaagaggtttttttgaatttgcaggaaatgcaataagtgaacttaagtataagggaatttctccagataaacttgaagaaatattgtcaagaggacacaaaggaatgcttaaaattattttaccaatatataaattgtatgatagaaaattaaagcaaaatggattgctagattatgatgatatattaattttagcagaaaaaactttaagcttagacgaagggcttagaaagaagtttcaaactagatacaaatatatatttgaagatgagtgtcaggactcaaatgaaattcaaggtaatataataaaaattatatctagtgaaaataaaaacctagttagagttggagatataaatcagagtataacaggaacattttcatcatcagaccctaaattttttaaagaatttataaatagtgcagatttctgttataggatggatatgtcaaatcgaagttcaaaagatatacttgatttagcaaacactcttgtcaagtatgttacaaaggaatttagacaagaagaatgtagacatgctcttgaagatatgcaaataaaaactgtgccaaatggaatgggatataaagaaaatcctaatccagaacattataatataaatgtaaagtggtatgagagttggaaaattgaaatagagcaaactgctagatacgttaagggtataaaaaataaatatccagataaaagtataggtatattggttccatttaatgaacaagtgacacaagttgctaaagaacttagagagaataatctaacctttgaagaattaggaccaaattctttgaataaaaggaaggttataaacaacatagcatatattattgattttatgttacattgtgatgatgtagaaaagttaatagttgtacttaataaagtttttatagatactgataatgaagaagaaataaagtattttttagaagaattaaaaaactattctaccgaagaaattatttataattttgaatttagtaagttagataatgatttaatagaatttaaagaagaaagtgacatatatttaagttttaaaagaggaatagatattataaaacagatattagaatatccaataataaggttagacctcttagttttgtttattgggaaaaaacttaatttagaaaaagaagataaagctgtactggattatatatctttttatataaagtatctaatatcagaaaatataaatatggatttagaagatgtatataatttattgtttgatgtaaagaatagggtgtttaatcatataatagatgtggtatatgagataaatggatatgaaccagagcccggtagtataacactatgtaactatcataagtcaaaggggatggaatgggattgtgtgtttttactaggtcttgttgaatataatttccctgacaatattaatcaaaagtttcagagtgataaatggtatctaaaagaaaaatataaaaaccctatggcaattattaaatcagaagttgaagctatattaaaaggaagtatttcaacagattatgctcataaaacgaagattgattctataaatgaaaagattagacttttatatgtagggattactagagcaaaggaaatgttagtactttcaggaagtgcttatagagatgaaagtgatatagggaataagagaaaagagcaaaaaccatgtatatatttaagcagacttaatcaacatattattgaaaaaaggtcaaattaatatataataagttattaaaagattgcttgaaatatatctaaaaggggataaaacaatatgtacagtaagtaactactaaaaaataaagttaagagagaagtgatatgagtgaacgataaattaaaatatttttcttatagtcaaaattcaatcaacacatataaatcatgtccattgaaatttaaatataaatatattgatagaataaattggaaaaatgatgatgttggtagtagagagtattatgaaactttaaaaacaggaagagattttcatttgatttgtgaaagatattttagcaatatacctcttggaatctattttaatgaggatgataaaaatagtaaaaagtttttaaagtggatggaaaatataaaaaaagttgttcctattgaaaaaggaaaaacgtatttgccagaatatgaagtaaggatgaccttaaatggggatataatacaggcaaagtatgatttagttgtaattggaaataacaatatagaaatatgggattggaaaaccgagtctaaaaagattgactataaacacgtagaaaatagaatacaaactattgtttatatgtttttagcaaaagaagtaatacctaaagttttaaaaatggacataaatgttaaagatataaatatgagatattatcaacctgaatttgatgacttaccaattaccattttatatgatgaagaaaaacatgaagcaaatagaaataaaattcaaaattatataagtatgataaaaaacactaattatgaagaacatacatacgaagacaatctatacaatgatatagaaaaggtatataataaagaagaacgtatgtgctatagaaataaaaagcattgcaagtattgtgaatttaataagttatgtaatggcaaagaaatagattatagtattttggaggcggaaatttatgggacttaggtttgtattaggtagaagtggaagtggaaaatccacctatatactagatgagattaaaaaagaagctcaaaaaaatgaaacgacatcaattatacttttagttccagaacagtacacatttgaggctgaaaatagagtaagtaagctattcttaggaaaagaaaaagataagtatctaagagttagggtacttagctttaagacactaagtaatatagttttttctcaagtaggaggattgacagatgtaaatataaattctagtggaaaagcaatgatggtatatagagctattgaagatgtaagtgaagaattaaatgtgttttcaaaatcaaaatcgcagtctggttttgtaagctcaattacagatatgatatcagaaatgaaacaatacaatataagccctgaaatgttagaaaatatatctggagaattggataatgaaactttaagtttaaaattaaaagatataagtaaaatatataattcttttgaagggaaattgcatgaaaattatgtagatgctcaagatatgttaacttcattggcaagtaaaattgaattaagcagttatttagatggagcttgtgtttatatagatgaatttacaggttttacaccaaatcagtacaatgtcataaagagtatattaaataagtctaaaagtgttaatatctctttgactgtagatgatatcaactatattgggtacagtaaatctgatatgttttctagaacgaaatttacttattcaaaattgactcaattgtgcaacgaagaaggcataaaaatattgccacaagtaaatttaaacacaggtgttataaaaagatttgaaaaagttaaggaattacagcacctagaaagattttataatgcttatccatataaaatatattcaaatccaactgaaaatataaagataaaagagtttaacaatttatattcagaggtggaagagatagccagagaaattgtacatttagttagagataagaatgtaagatatagagatataaccattgctacaagagatttaaatagatatgattttttagtacactctatatttaatgaatataatataccaaactttatagataagaagagagaggcaaaaagtaatccaatagttattttaattatttcagctttagaaatgaagaatagacgatatgggtatgaaactatgtttaggtatttaaaaagtggacttataggaattgataatgatgatataaatttactagaaaattatgtgttggctaatgggattaaaggtaaaaaatggtttgatgaaaaatgggattatagaataacacaaagtctttcaggtcaagaaagtgaatttgaactggaattaaaagaaaaaataaatgaaataaaaaatagagtattagagcctatagtaattttacaagaaaaattaagaggaaaaaatagagtaaaagaaatctgtagatatatatatgaatttttattagatataaatatgccagaaactatagaaaatttaatagtaaattttaaggataaaggggaacttgatgttgcaaatcaatactcacaagtttgggacatagtagtggacatattagaccaaatggtggaacttatgggtgatgaaataatttctttagaaaaatttataaaattaataaccttaggctttgatgaatatgaattaggactggttcctcctagtatagaccaggtacttgtaagtagtgtggatagaatgaaaaatccagacacgaaatatttatacctagttggaactactgatggtgtgtttccactgattacaaaggatagtggaatattgagtgataatgatagggaaagtcttggaaacaaaggaatcgaagttgatattgatagtaagactaggagttttgaagaacagtttcttgtatataaagctcttacttcgacatctaagaatttaaccataacatatccaatatcagaccatgaaggtaaaacgcttagaccatcaataattatatcaagacttaagaagatatttccaaatatagaaaataaaagttatttagtggaagaaaataaaagcactgataaagatatacttaaaaaaataacggttaaatcccctacatttaatgaacttataaacgtaataaaaaattatgacagtgatgattacaatacagaagagattaatagtatttggttagatatatataggtactatttaaaagatgaaatctatagttctataacaaaaaaagttataaaaggtcttagttatactaatcaagttcataagattgaagagaaaaaaataaggtcattgtataaaagtaattctcttagcatatctaggcttgaaaaatatgctgaatgtccatttgcttattttatacaatatggtctaaaagcaaaaaagcgtaaagagtattcatttacaccaccagatttaggaacttttattcataatattttagataggttttcaaaagaacttttacaagataatttaacttggagagatattgatgaaaaatatatagaattaaagataggtataatagttgatgaaataattttaaagataccaggatatatattaaatagttctgagaggtataaataccttgcatatagattaaagaatatgttgacaactgctataactataattagtcagcaaataaaacaaggttcatttgaaccaatagattatgaagttaaatttggcgacaatggaaaatatccacctataaaaatggtgttagaaaatggacaagaagtaagtttaattggacaaatagatagagttgatgaatttgaagaaggagaaaataaatatataagaataatagattataagtcaggcaataagtccataagtctaacagaaatatattatggtctacaattacaattacttgtgtatttagatgcaatccttgaaagtgcaaaggatgaagatataaatataaatccagctgcaatactatattgtagaataaataatccaatagcaaaatttaatgaagataaagatgatgaagaaatacaagaagcaatattaaaagaacttagaatgaaggggcttgtagtaaaagactctcacatagttaaagagatggataaatcattaatagatggagaaaggaaaaactctttagtaataccagtaggtcttactaaggatggaaatgtaggtaaaagtacttcagcaataagctatgaggatttcaaactgcttagaaaatatgtaaggcatgctataaaggatttatgtgaagaaatgttaagtggagaaatacgtatagctccatataaacataaagatggaacatcatgtgacttttgtgattactctactatatgtcagtttgattcaactataaaagataacaagtataaaaatttaaataataagagtaatgaagagataataaaaatgatgaaaggagatgttaattagtgagttctcctaaatggacaaaagagcaattagaagttataggaagtagagaatgcaatttattggttgctgctgctgctggttcaggaaaaacagccgttctagttgagcgtataattcaaatgataacaagtagagaaaatccaattgatatagataagttattagttgttacatttactaatgctgctgcgtcagaaatgagagagaggataggggatgctataggaaaagccttagatgaaaacccagaaaataaacatttacaaaaccaacttgttttattaaataaatctagtattacaacaatacactcattctgtttggatgttataaaatcaaactttcatagaataaacttagaccctaatttcagaataggagaccaaactgaatgtgctattttgaaacaagaagcaatagaggaagtatttgaagatttatatgaagaaagagatgaggggtttttaaatttagttgaaagttatgcagaaagaggaggagataaagaagtacaagatattatcttgggaatatattcatttgcaatggcttctcctgaacctaaaaaatggttgattgactcagcagaacgatttaatattgatgaaaattttgatttttcacagtctatttgggctagagctatattagacactgtaaaaatagaaattaatggtctttgtctaaatatggaaagggcattaaaagaagtggaatcaatagaagaattagaaacttttgcagaaaagttatccgttgaatataaaaaaattgctaacatttcacaagcatgtaataaatcttgggatgaggcatataaaaagatggcaagtatgtcctttgaaaattatgtaaaaggagtaaaaagaatttcaaaagatgctccttcgtatataaaagaatcaaaagaaaaggcaaaaactataagagataagactaagaagtctttagaaagtatagtaagtgctacattcaataaagataatgattctattagagaagaaataaaatatctttataacatagttaaaccaatatctagtgttgtactgagatttgaagaggaatatagcaataagaaaagagaaaaaggaataatagattttaacgatatagagcattttgcattaaatatacttacagatatagatgaaaaaggtaatattgtaccttctgatatagccgttggatatagaaacaagttttatgaaatatttatagatgaatatcaggatagtaatctagtgcaggaagtactgcttaaagctgttgcaaatacagaaactccaaatagatttatggttggtgatgtaaaacagagtatatatagatttagacaagcaaagccagaattatttttgcaaaaatataataactataatgataaaaagggaagttcccatagaaaaataatgctttacaaaaattttagaagtagagaagaagttgtagatgctgtaaattatatatttgaaaatataatgaatgagaatataggagaaattgaatatacagaaaaagaaagactaaatttaggtgcgaattttaatgtggatacagacgagaaatctattattggtggagcaacggagatacacctaatacaaaaagataataaacttgatgatgatattataaatgataaagacgatagaattaataacaaagaaaatgaaatagaggaagaagaaaaattagataatatacaacttgaggctagaatggttggaaacattatcaaagatttaatgaaagtcaatgaagatggaaaaattcaaaaggtctatgataagggaatagatggatatagacctgtggaatttagagatatagttattcttttaagagctacatctgcatgggctccagtgtttgcagatgaattgatgaatatggatataccaacatatgctgatgttggagtggggtattttgatacgattgaaataaaaacaatattgtcattacttcaaataatagataatccaatgcaagatatacctcttatatctgtattaaaatcacctatatttggatttacaccagaggatttgattgatattagagttcagagtaaagataaaattttttatgaggttttaaaaagtacagcagagtatgatggatttacagattctcaaaatgaaactgagtctgagtttataccaagtgaagagtgcataaacaaaagtaaagattttttaattaagctaaaggaatttaaagaaaagtcaatgtacatgagtacagatgaatttatatggtacttgtacacaaggactggatactatgcttatgttggagcattgccaggtggaagtcaaagacaagctaatttaaaagtattgtttgagagagcaaaacaatttgaagaaaccagtcttaaaggaatattcaactttgtaaattttatagagaaattaaaaaaatctagttctgatatgggaagtgcaaaaacacttggtgagaatgcaaatgttgttagaataatgagtattcataaaagtaaaggtctagaatttccagtagtcatatgctctgcaatgggtaaaaatttcaatactcaagattttaaaaagagtattttatatcatcataatttagggtatggacctcaatttgtagactatgagagaaggatttcttttccaagtatagccaaagaagcattaaaaagcaaaataaatatagaaaatttatcagaagagatgagagttttatatgttgcatttacaagagctaaagaaaaattgattataactggttctactagaaatatacaagatagtataaagagatggtcaaatggaattgaaagtttagatacaatatcacaatacgagatattaaaaggtaaaaattttttagattggataatgccttgtgtattaagacatagggatttatctaatctactagaagaagtaggattagacgcagtttttaatgttgaacataattcaaaatggtatggaaagttgtggaataagaatgatattttagtggaaaagaagagtgatgaagaaaaagaaagtattgaagaaattcttgaaaaaatagatgtagatagtccggacagtgattattacagtgaaatagaaaaaaaattaaactatatatatccatatgaatttagtacaagaaaacctgctactatatctgttacagaaataaaaaagatacaaaataattatgaagaagagttaataaatactatatttgaacaaaaagtaatattaaaaaagcctctatttattcaaaatgaagaagaaagagaaaaaataagtggaacagaaagaggtacaatagtccatttggttatggaggttttagacttaaaaaatgtaagtagtgtaaatgatataaaatcacaaataagaggttttgtttcaaaaggtataataacagaaaaacaagctagtatagtaaatccatataaaatatataaattttttgcctctaacataggaaaaagaatgttgaatgctgaaattataaatagagaaaaatcaatttatgcacaagtaaatatgaaagacatatatatttatgaaaagcttataaacaatgatgataaaaaactttatgataatgaaagtgtcatgttaagaggtatagttgatgcttattttgaagaagataatcaaatagttttggtggattataaaacagattttgtaaatgaggaaaatataaatcaaataatagagaaatataaaaaacagttggatttatatgcagatattattgaaactttaactggtaagtcagtaaaagagaaatgtatatatttatttggagttgatgaagctgtttgttattagtttttatatataaattaaacctaaaagatagaggaaggggaaaaaatgagatttattcatacatcagattggcatctagggaagtccctagaaggccattctagaattgaggaacaagcaaagttttgtgaggaatttataaaaatagtagaatcaaatgaaatagatatggttataattgctggagatgtatatgatacttctaatcccccagcacaagcagaaaaactattttatcagactgtatcaagacttgccaataatggtcagaggtgtgtattaataatttcaggaaatcatgataatccagagagactttctgcaataacacctctagcacatgaacaggggatacttatatatggttatccattaagtgctacgatagaagctaagtataaagggtttgaaataacatatgcaactcagggatgtacaaaactgaatataaatggagaaaatattgtgattgctacattaccttatccaagtgaaaaaagattaaatgaagttttttcaagtgaagatgagtttgagaaacaaaaaaattattctgaaaaggtaggagatatatttagaagtttagaagaaaattttagaagtgatactataaatatagccgtatcacatatatttgtaataggtggagagagtactgaatcagaaagacctatacaattaggtggaagttttttagttgaaagaaaagatttgccagaaaaggctcaatatactgcactaggtcatttacataaacaacaaaaagcttccgaacgtttaaatgcatactattctggttctccacttcaatatagcaaggatgaaagagcgtataccaaaggggcatacatagtggatataaaagctggagaaaaaccaataattgaagatgtatattttaataattacaaacctatagaagtatttaaatgtaatggaatagaagaagcactagatatatgtgagcaaaatcaagatagagagatttggtcatattttgaaataaatactgatgagataatatcacagaatgaaattaaaaaaatgaaggaactattaaaagacataatagaaataaaaccaataataacatcttgttatgaacaagaaagtgtagatataaaagaaaagtctatggcagagttgtttagagagttctattcttttagtaaaggtgtagagccaaaaggagaacttatggatttatttctagatataataagtgaagaaggtgaatcagcagatgagaccaattagattagaacttacaggacttaatagctatattgataaacaagttatagactttgaaaaattaattgaaagaggtttgtttgggatatttggaactactggaagtggaaaatctacaatcttagatgcaataactattgctatgtatggaaatatatccagaaatacaaaagaatatataaacagtgtgtgcgataaggcaattatatcatacgagtttgagataggaagcaaaaacactagaagaagatacattgtagatagaaccattgctagaagcaaaacaggaacaaagacctctaatgctagattaatagaagtattgaatgacaatatccaaaatgttttagctgataaagttgtggaagtaaatgaaaaagtagcacaggttgtaggattaacggcaaatgattttactaggtcagtagttttaccacaagacaaatttaatgagtttctaagattatcacgtgcagatagaagagacatgttagagagaatttttaatcttgagaaatatggaagaagtcttggagaaaaagtgaaaaagagaaaaaatatacagttacaaaatttaaaagatttgaaatcaaaattaagtcaatatgatggaattacagaggaagtatacaacaatataaaccaagaattaatagagttaaaaaatttggaaaaagataagaataatgctttagacctagctcaaaaatcttatgaagaaagtaaaacagtatatgaagaacaattaaagttagaaaaaaatgaacttagaaaaaatgagcttgatttaaaaaatagtgagataaaagaaaagattgctcttgtagaaaatgatagtaacgctaaaaaggtagacccatacataagttcagttcaaaatctagaaaaaaagatagatgaagatagctttgtagtaagtaatttagaaaagaaattagcaatattaaatcaggagcttgaagttacaaaaaatagatatgaaaaaataaacaaaattaagaatgaagaagtccctaaattgagtgaagaaaaaataagattgcaacaagcaataaaattagaagaagagttagttttattagatagagagttaaaagatctaaaagaaagtggaattaatttaaataagactaaagttgaattagaaaaagtaaagcaggtgtcagagtccagaaaagatgcagttactaaatctataaaagaagttgaaggaaagattgataaagtaaatataagtgcagaattaaaacaaaaaatatttctagcatatgaatacgagaaagattacaacaacgtattggaagaaaaaaatcaaaagctaaataaactagaagaaatactcaaagagacagaaaatataaatttaaaagttagatatattgataaagataagaatgatgtaaatcgtaatttagaaaatttatcacttcacttggatgttcttcttaaaaaatgtcctggtaagagtgctgatttacttttaaaatctgaatatgttactgaattaagaagtaaagcaaataatactaaagaaaatgaaattaagaaaagcagtatacaagatgaattaaagataatacttgaaagtaagtttaatactgaaagggaagtaaatttactaaatgaaaaacttgaaaataatagaaagaatagagatgacctagaaaaagaattagaagaactaaagtatttaaatttagcctctgaacttagacgtgaattaaaagaaaatatgccttgtccagtttgtgggtcaaaacatcatgaaaatcataatataactaagtatgatgaaaatatatcttttgtcaaagaaaaactggagaaattagaaaaagaaaaaataagtataagaaacaatatagaggaattaaatgctaaagtaagtgggtatttatctatagaaaaaatgaagactaaagaacttgaagatgtaaaaggaaaactaggggggattccatctagtcaattattaaaaaaacttgatgaagaacaaagaaaacttgcattgttaaaatctaatattcaggagtgggagaaagaaaaagagagtactgaaaataaagtaacattagctaaagaagaaaaaaataaaattgaaaaagaagaattaaaaataagagagagtctgaataattataagaaattaacaagagatttaaacatagaaatagaaggtttagaaaataaatgtaaaaaacttaaacaggaatacctaggattaaagacgattactaaagtctctaatctattgtcaaaagtaaaagaaataagggagaatgaaaaagaattagaattactaagtactgggcattcaaatttattaaaaaatagagactcactagatattaaaataagagaaaatgagagtaaactacatgaaatagagatagaattaataaaggctagagaattatatgtagaaaagaaattgagtagagataataagtataaagaagttattaacataacgaaaggtgatttagctaaaaatcttttacataatgttgaagaaaatatatgtaagatattagaacaagaagaatcaagtaagaaaaaattggaagagcaaagattagaatatgaaaaaaacattgctgaaaagcacaatatagatggtagacttaaaactgctaaggaacaatataaagaccaaaaatcaacactaaataaactattagcagaaaataaatttgaaagtatatatgcagtaaaaagagctttattagatactgatgcagtaaaaaaattgattgaagaaatactagagcatgaagaagaacaaaagttattatcatttaagataaaatcatcaaaagaaaaattaaatggaagaagcataaagaaggagtactttgaacagttaaaagatgaaatttataatttgaaagtagaaataggaaatatatccaaagatattggagctaatcaaaatcagttaataacactaaaagactctttagataagataaatgattttaataaacaacttaaggtagttgaacacaatgtggacttattggaagaattagataaatgtgtgcaaggaaataaatttgtagaatatgtttctacaaaccaattaaaatatatagcattggaagcatcaaaacgattggatggaataacaaaaggaagatatgcacttgaaattgactcaacactaaactttgtaatgagagataactttaatggaggagaaagaagaagcattgatactctatctggtggagagacattcttgacatctctatcattagcacttgctctttcatctcaaatacaattaaagggaagtgcaccattagaatttttctttttagatgaaggttttggttcattagatagtgaacttttagaaattgttatagaatccttggaaagattgcatagtaataatctaagtgtgggtataataagtcatgtcgaggaacttaaaaatagagttcctgttaagctattagtttcatctagtgaggctggaataggttcaaaagtaaaaattgaatatagttagaaaatatatggtaattgaatatattatctaatatttccaaataatatgtaattgtgatataataaaaactaatattaaagttatttataattaatattaatataaaaacatgtaagtaggagtgtggtaagtgttggaatcgcccaataatttgattcagattatttttttaatagtattacttatagggtctgcatttttctcagcatctgaaacggccttaatgtcgttgagtaaaatcagaatcagatatatgcaagatgaaggagttaaaggagctaagttagtaagttcattaatagaaaatccaaataagcttttaagttctatattggttggaaataacgtcgtaaatatagcagcaacatccatatcaacatctttgtttataggattaatgggagaaaaaggagtggcacttgctacagctgttatgacagtattagtattaatatttggtgagattactccaaaaacaatagcagcaaataattcagaaaaggtttctctattagtatctaaacctataaaagcaattatatttatattaagaccaatagtatggatatttaatataattacaaatattatatttaaattatttggtataacaaataaaggagctaaatcattcataactgaagaagagctaaaaactatggtaaatgtaagtcatgaagaaggcgtccttgaaatggaagagagagaaatcataaataatgtttttgaatttggagatatgcaagctaaaaatgcaatggtacaaagaatagatatggtagctatagatatggaagatagttatgatgagataatacaggtatttaaaactgaaaaattaagtagaatgcctgtgtatgaagaaactatagatgatattgtaggaatacttaatataaaagatattatatttttatctgatgaagaaatagagtcatttgatattaaaaattatatgagagaaccttttttcacgtatgagttcaaaaagataacacaacttcttgaagagatgaaacttgaaaaaagtcagatggctatagttgtagatgagtatggtggaacatctggacttttaactatagaagatttagtagaagtcattgttggagatatagaggatgaatatgatgaagaagaggatgaaatacaagttataaaagaagatgagtatattgtagatggaagtactaaaattggtgatgttaatgaacttattggtgtaaacttggaatctgaggagtttgattccataggaggttttataattggacacctaagcagattgccagaagaaaatgaagtaattgaagttgataatataagattttgtatagaaagtatagaaaaaaatagaattaaaaaaataagaatatatacataatgtaataatgttcttaaatttattagaagtgtataaatataaaagatatcttttatatttatacacttctttttattttgtattcaaataaaactagtatgaaatggacaaaataaaaatataaattagaagaaaggagatttttaagatgagcatactagaaaataattttttatacaaattaaaaaacaacactatctttttttgtatatatacattgttatttatttttatttacaaagcgtttccatacatagctccattttttctaggtgctataatagcacttatgattaatcctatatcacaaaagttagaaaataagtttcgtataaataaaggtatctctactcttgttctaagttttcttgcagtggctatagtcagtacagttactacaataatagtaataaattcaatgaaagaattaatgggatttttaaataatatatctgctaatcctgaggatataagtaatactattatgtattttttaaataaaataaatgactttatgaaatcatttcaagaaatagccaattttgatgtagaacaattagtaaacaaattcagtggtgaagtaatgcaaattacaaaaaatcttcttactagtatacttggattggctacttctattccatatattataatatttataattaccttgtttattgctacctactttatagcaaaagaccttgataagattgaaaatagtttttataatatgtttactgttgatgttagaaagaaggtaaaaaacgtaaagaaagaggcagggctttcacttgttggatatataagggcctatacaatacttatggctataacattttttgcaatctggggaagttttgctttatttggattgaaatacggtctaatagtagggtttgtaggagctttaatggatttaattccattcctaggtataataacaatatatcttccagtaattgtttattattttcttataaaaaattattttatagctataagtatgactgtgatattttttgttttgtctttgattagagaaatacttgaacctaaactagtatcagtaaatgttggactaaatccattagctaccctagcagcgatttttattggaatccaagtaaaaggaataattggagtaattttttgtttgggtttggtatgtatgcatgatatacttaagaaggtggatattttttaattataataattgatagatttttttaaaaataaaattttattcacaggtaaataaaaaaatattaatcttattaagaaagagggtatatacgtgaaacaaaaagtagtggaaagatttttaaaatatgtatcatttgatacaacatctaattctcagtgtgagaactgtccatcttcagaaggtcaaagagttttagctaagtatatagttgaagagctaaaaacaatgggtgttgatgatgtgagtttagatgaaaatagttatataatggctactttaaaaggaaatactgatggtgtggatactataggattcatatcacatttagatacaattgaagatgttagtggaaaagatattaaaccaagaataatagaaaattatgacggaaaagacatagttttaaatgaagcgttaaatgttattacgtatgtaaaggattctccagagttggaagaatttaaaggtgacgatttaatagtcactgatggaacaactctacttggctctgatgataaagctggtatagctgagatagtgactgcaatagagtatctaataaatcatccagaaattaagcatggagatataaaaataggatttacaccagatgaagaaattggtagaggtgctgatttatttgatgttgaaaaatttggagcaaaatatgcatatactttagatggaggaatagttggagaacttgaatgtgaaaattttaatgctgcaaatgcaactattactatacatggtagaaatgttcatccaggttcagctaaaaataaaatggtaaatgctatacatatagctgctgaaatatcagaaatgttcccagcagatgaaagaccagaaacaacagaaggatatgaaggattttggcatttaaattctataggtggaaatgtcgagaatgtaagtatggcttatattattagagaccattgtagagaaaaatttgaaaatagaaaatctattatgatagagaatatagaaaaaataaataagaaatacgataatagagtggaattggatttaaaagattcttattacaatatgaaagaaaagattgagccagttatgtttatagttgatatagctaaagaagctatggaggaattaggtataaaaccacgtttagttcctgtaagaggtggtactgatggagcaagattatcttttaatggattaccttgtccaaatatatttactggtggattaaacttccatgggaaaaatgagtgtataccagttagttctatggagaaagctactaaactaattgtaagaatagctgaaaaatatgctgaaagagtttagttaaaaagtatttaaaaattaagcatttaaagttataatagctatatcattctttataagtcaagctgattataagcttgtgttgtatttaaaatggtatagctatttttgtaattatttttataaaagataattatttttagtttagggtatcaataaaaagtatggatatcaataggtattaacatttaaaagggggaattgtattgaaaattaaatctaaaaaaataatagcatttgcactttcacttgggattatgttgccaagttgtgtatatgcagacactattagtaaaaatcaaaatgcacaggtagatatgaacaattatcttcaaggtagaaaatctccaaaggaggaaaaacttattggtgaagatagatttgatacagcgataaaaatatctcaaagtggttggaataatggttcagaaagggtgtttctagttaactcaaattcattgccagatgcattggcttcaactcctttggcaagtaaattggatgcaccaatactgcttacaaataaaaatagtataccatataatgtaacagaggaaataaaaaggcttaatccagcagaagttattttaattggaagtgaaggagctatttcatcaagtgtaaaagaatctcttgaagatatggaagtattagtcagtagaatcggtggagcagatagagaagaaacatctttacttcttactagacagctagatgatactggtgatttaggtgtctcaaaagtggcagtggttaatgggtataatggactggcagatgcaacttcaatatcaagcccagctgcaagtgataatacagctataatatatacaggtaaggatagcataagaagtgaggcaaagaattttattacacaaaactcaactaagacatacatagtaggtggggagtacagtataagtaaaaaacttgaaggacagttagtaaactcagaaagactagcaggaacagatagaaaagatactaatgcgaaagttttagaaaagttttatggaaaatcaagtaaggttaataatatgtattttgcaaaagatggaagtggtagagaagctgatttagttgatgggcttgctgctggagtattagcatcaaaaacaaagtcacctgtagtacttgcaagtggaagtttaagtagtgcacagaaaagttttataaaaaaagtaaaggctgataaatttgtacaagttggtggaggtaaaaatagtaaaccatatgcagaagcattagccttacagtaatattgtgtaaatcaaaattaatatataataatagcaagtaaaccaagttgaacttcaatatatataataaaataagtaaactaagttatatttcagtataatatataatgaaataagtaaactaagctatgtttaaatataatatataataaaataagtaaactaagttatatttcagtataatatataatgaaataagtaaactaagttatactccaatataatatataatagaaacaagtaaactaagttatatttcaatatagcatataataaaacaagtaaaccagattctatttaattagaagtttaaggtattgtacttaaacttctaattgagatagaaataaaatggtttacttgtttttattatgagtttaataaattaaagcttattttatttttattaaaaatttactaatcattgatatttattatatttccagtattgatgtcaattaagtttatatcaagttcaagctcatcctcatcatcagtttttatgatatctataattgcgacagaatggcttccatcttttgggatagaagtacttcctggatttattactattaaattatcatccatgtatagtttttttacatgagtatgtcctaaaactaatatgtcaccacccattttctttgctttgtcaataatttcttcttctgattctatataaccatgattcaatataattctaatttcaccaaattggctcatgacataaggactctgaataggatgttctataaccatctggtcaacatctgcatcacagttcccttttacaatcacaatgttttctaatttatttaatgtctcaataaattttttaggattatatccttctggaatatcatttctaggtccatgatataagacatctccaccatgtaataaaacatcacaatcagataatacatttaacgctttttcaaagtaaagtaagctaccatgagtatcactcattattcctattttcatattaaaaatcctcctaagtacagtctataaaaatttttcagatactctatgccaaaactcatagtttgacattctaagtaattttatttttgcatcagatatactaacttttatattttcgatttgtctaaatctgtgctcaactccatcaacgacaatcaatacagaatcttcaaatctatattctggtgcaatctttataacagattcatttgaacatattatacttgatgtaaagcacctatatgcattggtatttatcggatgtaaaggtgtaatctgcataagttcaagatttatatcaacaatactacctccagcagaatagttataggctgttgaacctgtggaagtagaaataatcataccatctccactaaaattttgtatatgtttattatcaaggcttaaatttaggtgtatagtcctagacttgtctcctcttataacaacctcatttacagcaagcatattagaaccactagtagttgtatatacttccgcattaagaagtgacatttcttgaataatataatctttttttgtataagcttcaataaagctatcaatcttatctggtaaaatatcaggaaaaaaccccagatgacctgtatttattcccattatgggaatctcaggaaaatcgaaatctctaactgttcttaaaaaagagccatcaccaccaattgatataataagctctgtgtctggataaatatctgaatacacttcaaagccagcattgataagttttctagttaagagttctttagtctcaagggacttatttaattggtttgtatttatagttataattcttttcatatattcacctcttcatactttgtattataacatagttttataattcttaatttataaatttataaatgacctttgtagtgaatgtgttaaaatatgtataggtgggtataaaaaaatgcataagaggtgaagatgtgtttagcataaggaatatcacaaaaaaattaggaaaattcaagttaaataatataaacttagagttaaaggaaggggatattgttgggattataggaccaaatggttcgggaaaaacgactttaataaaaattataatggggattattgatgcagatgaaggtgaaattgaactttgtaatgaaactattgaaaattctccaataagctttaaaaacaatattggttttgtatatgattctttacaattttatccacatttaaaggttaaggaatttagaaaaatagtttctttattttataagaattttgatagagaaaaatttgatgaataccttaataagtttgacatagaagaaaatatgcatattgaaaatttatctaaaggtcaatctgagaagcttatgttatcaagcgcacttagtcataatgctaagttattgattttggatgaaccaactgctggtatagacccgattgtaagaactgaaataatgcagtacttacaagattttgtgaaaaatggaagtagtagtgtaataatttctactcataatactgataatttaattaaaattgctgattatcttgtttttataaatagaggaaatcagatttttactgttaagaaagaattaatagaacaagaatataagataattagggcaaataaagcagagttagaagcaattaaagaaagtatagttggtgttaaagagtataaatattataatgaggcacttgttaaagttggagatagcttgaaagtaaaaagcctattgatagaaattgataagcataaggtcaaaaatcctactatagaagaactaatgtattattatgtaaatgaggtgagaggatgttcaatttaataagaaaagatttaataataggaattagttcagatggtatccgtaatttaaagtacatattgctattttttgtgttttattttttccttaattcaatttcatattatacagtaagtattgttgttagttatttgatatttataaatacatttgagtgtgattatgaaaatgattcaaggatttttataaggagtatgccagttagtatagaagatatagtttactcaaaatatttattaggtgtaggactaataatttctgtaacaataattgtgtccttactaagtaaattgacatcactagtgttctttagaaatatggttttaaatgatgtatttttttctgtaaatatatttttagcaattttgacgattttactgcctttaatttttaagtttggatatggaaaaatgaaagtttgtggttttatagtaagtattttaatttactttgtatatggaagtcttttgaagatgattagtatgattgtatatcaagtaaagcattttaattatagtaaagttggaggagtatatctttcaaattatgtaactgatatagctaatactaagtatataaatttatatagtatgacatttttaacaataataatttttataatatcaatgtatttttctattaagatttcaaaaaagaataagtttaattattaaaattttaattaatattatagcacaatagcacaaaatataaggagactaaaaatgaagaagtttataaaagtttcattttttattttggggatttttacactattcatagctataaataaattagtatatagagatatggtaagtgtcaaagattatgaaataaatcatttagaggaaattgtttttgattttgatagcaggagaagtagagatatcggtactattgtaagatttaaaataagcaataatagtaaatatagttataaattaaacagtgctaaaatgaagtttgaaaattgtgtggaaaataaaaagggaatgaataagtgttctgcatatgtaaatgtagatttatttaatgaaaaaaattctataactgaaagtactctgaaatatggaataaaaccaaataatcaaggttatgttgattttgtaattccaaaaggactaaattttgattataggtactttaatgaatctggtatgagtgtagaatataaaggagaatatattgtcaatattccaatggcaaaaggactttatctagtagttggaaaaaataatgatacatggaatgctaatattatggaataatttgaaaaataaatcaattatagatataattaagaataatatgaaatttataaaaattcagactaggaggggtatttaatgtcaataagtaatgtaagagagtattttaaacaatttggcaaggaagacagtatattagaatttgaacaatctagtgctactgtggaacttgcagctgaagcagctggggttattccagcaagaatagctaagacactctcatttaaaataggagatgatgcaattttaattgtgacagctggtgatgctaagattgataataagaagtataaggctgaatttaattgtaaggctaaaatgttgacaccagaagaagtcttggagtttactggacatgctattggtggagtctgtccatttggtttaaaaaattctataaaagtctatttagatgattcaatgaagagatttgatacagtatttcctgcatgtggcagtagtaactctgcaatagaacttacatgtgaagaaatggagaagttttctaagagtgaaaaatgggtagatgtttgtaagaattggtaaaaaaatatagtaaactatagtaggaattagtaaaaaactacctctgtatacaatctatacagaggtagttttttgtgtaaatatttataaatctaagaggaaaatctaatttaaactaataatccaaaataaagttaaaaaattctgattttttttcgaaacaataaaaaaatgacaaaaaagtggaaaaaatgtaataaatattgttaaaaaaataattagaaattattgaaaaattatcctttgagtgttactattatagatgtaagatatttaaaaataaaaaatagtcagataaaaatacgattatttagctctattaaaataatttttatacgataaaaatcttctgtacatggctaaaaaacagatgtacagacaatatttaatgtttaatataccctaatataaatatcgtaaacaaattattttatctgtgaccagtgtgaaagaaatcttattctaacttgaaatttcacaaaattccaaaaagcgagattttttttaagtatagttgattttaaattaacaatttatgattaaattaatgtcataattggttagtataatcacatataaatatagagcgtagtttgattaaggttataaatttctcgacgtatattcaaataccttattatagatgttgccgagattttaattaataaatgaaaataaaatatttataaaatactgaggaggctattatggatttaaattctaaaaaatatcagatgcttaaagagctatatgtaagcttcgctgaaaatgaagttaaacctttagcaacagaacttgatgaagaagaaagatttccttatgaaacagtggaaaaaatggcaaaagcaggaatgatgggtataccatatccaaaagaatatggtggagaaggtggagacactgtaggatatataatggcagttgaagaattgtctagagtttgtggtactacaggagttatattatcagctcatacatctcttggctcatggcctatatatcaatatggtaatgaagaacaaaaacaaaaattcttaaaaccactagcaagtggagataaattaggagcatttggtcttactgagcctaatgctggtacagatgcgtctggccaacaaacaactgctgttttagacggggatgaatacatacttaatggctcaaaaatatttataacaaatgcaatagctggtgacatatatgtagtaatggcaatgactgataaatctaaggggaacaaaggaatatcagcatttatagttgaaaaaggaactcctgggtttagctttggagttaaagaaaagaaaatgggtataagaggttcagctactagtgaattaatatttgaggattgcagaatacctaaagaaaatttacttggaaaagaaggtcaaggatttaagatagcaatgtctactcttgatggtggtagaattggtatagcagcacaagctttaggtttagcacaaggtgctcttgatgaaactgttaaatatgtaaaagaaagagtacaatttggtagaccattatcaaaattccaaaatacccaattccaattagctgatatggaagttaaagtacaagcggctagacaccttgtatatcaagcagctataaataaagacttaggaaaaccttatggagtagaagcagcaatggcaaaattatttgcagctgaaacagctatggaagttactacgaaagctgtacaacttcatggaggatatggatacactcgtgactatccagtagaaagaatgatgagagatgctaagataactgaaatatatgaaggaactagtgaagttcaaagaatggttatttcaggaaaattattaaaatagataaatattaaaatatacacaataggtcgatattaaaatagatatggaggaaggatttatgaatatagtcgtttgtataaaacaagttccagatacaacagaagttaaactagatcctaatacaggtactttaattagagatggagtaccaagtataataaaccctgatgataaagcaggtttagaagaagctataaaattaaaagaagaaatgggtgctcatgtaactgttataacaatgggacctcctcaagcagatatggctttaaaagaagctttagcaatgggtgcagatagaggtatattattaacagatagagcatttgcaggtgctgatacttgggcaacttcatcagcattagcaggagcattaaaaaatatagattttgatattataatagctggaagacaggcgatagatggagatactgcacaagttggacctcaaatagctgaacatttaaatcttccatcaataacatatgctgaagaaataaaaactgaaggtgaatatgtattagtaaaaagacaatttgaagattgttgccatgacttaaaagttaaaatgccatgccttataacaactcttaaagatatgaacacaccaagatacatgaaagttggaagaatatatgatgctttcgaaaatgatgtagtagaaacatggactgtaaaagatatagaagttgacccttctaatttaggtcttaaaggttctccaactagtgtatttaaatcatttacaaaatcagttaaaccagctggtacaatatacaatgaagatgcgaaaacatcagctggaattatcatagataaattaaaagagaagtatatcatataatttaaggggggataaagaatgggtaacgttttagtagtaatagaacaaagagaaaatgtaattcaaactgtttctttagaattactaggaaaggctacagaaatagcaaaagattatgatacaaaagtttctgcattacttttaggtagtaaggtagaaggtttaatagatacattagcacactatggtgcagatgaggtaatagtagtagatgatgaagctttagcagtgtatacaactgaaccatatacaaaagcagcttatgaagcaataaaagcagctgaccctatagttgtattatttggtgcaacttcaataggtagagatttagcgcctagagtttctgctagaatacatacaggtcttactgctgactgtacaggtcttgcagtagctgaagatacaaaattattattaatgacaagacctgcctttggtggaaatataatggcaacaatagtttgtaaagatttcagacctcaaatgtctacagttagaccaggggttatgaagaaaaatgaacctgatgaaactaaagaagctgtaattaaccgtttcaaggtagaatttaatgatgctgataaattagttcaagttgtacaagtaataaaagaagctaaaaaacaagttaaaatagaagatgctaagatattagtttctgctggacgtggaatgggtggaaaagaaaacttagacatactttatgaattagctgaaattataggtggagaagtttctggttctcgtgccactatagatgcaggttggttagataaagcaagacaagttggtcaaactggtaaaactgtaagaccagacctttatatagcatgtggtatatctggagcaatacaacatatagctggtatggaagatgctgagtttatagttgctataaataaaaatccagaagctccaatatttaaatatgctgatgttggtatagttggagatgttcataaagtgcttccagaacttatcagtcagttaagtgttgcaaaagaaaaaggtgaagttttagctaactaatttcttggggagggtattatgagtacaagtgatgttaaagtttatgagaatgtagctgttgaagtagatggaaatatatgtacagtgaaaatgaatagacctaaagcccttaatgcaataaattcaaagactttagaagaactttatgaagtatttgtagatattaataatgatgaaactattgatgttgtaatattgacaggggaaggaaaggcatttgtagctggagcagatattgcatacatgaaagatttagatgctgtagctgctaaagattttagtatcttaggagcaaaagcttttggagaaatagaaaatagtaaaaaagtagtgatagctgctgtaaacggatttgctttaggtggaggatgtgaacttgcaatggcatgtgatataagaattgcatctgctaaagctaaatttggtcagccagaagtaactcttggaataactccaggatatggaggaactcaaagacttacaagattggttggaatggcaaaagcaaaagaattaatctttacaggtcaagttataaaagctgatgaagctgaaaaaatagggctagtaaatagagtcgttgagccagacattttaatagaagaagttgagaaattagctaagataatagctaaaaatgctcagcttgcagttagatactctaaagaagcaatacaacttggtgctcaaactgatataaatactggaatagatatagaatctaatttatttggtctttgtttttcaactaaagaccaaaaagaaggaatgtcagctttcgttgaaaagagagaagctaactttataaaagggtaaaaatctaattaaaaatatatttgctgttaactagattaaatagtattttaatctagttaacagaatataaatactaaaataacaggaggttataactatgaaattagctgtaataggtagtggaactatgggaagtggtattgtacaaacttttgcaagttgtggacatgatgtatgtttaaagagtagaactcaaggtgctatagataaatgtttagctttattagataaaaatttaactaagttagttactaagggaaaaatggatgaagctacaaaagcagaaatattaagtcatgttagttcaactactaattatgaagatttaaaagatatggatttaataatagaagcatctgtagaagacatgaatataaagaaagatgttttcaagttactagatgaattatgtaaagaagatactatcttggcaacaaatacttcatcattatctataacagaaatagcttcttctactaagagaccagataaagttataggaatgcatttctttaatccagttcctatgatgaaattagttgaagttataagtggtcagttaacatcaaaagttacttttgatacagtatttgaattatctaagagtatcaataaagtaccagtagatgtatctgaatctcctggatttgtagtaaatagaatacttatacctatgataaatgaagctgttggtatatatgcagatggtgttgcaagtaaagaagaaatagatgaagctatgaaattaggagcaaaccatccaatgggaccactagcattaggtgatttaatcggattagatgttgttttagctataatgaacgttttatatactgaatttggagatactaaatatagacctcatccacttttagctaaaatggttagagctaatcaattaggaagaaaaactaagataggattctatgattataataaataagaatttgggaattaaaagtttaaataaaattgtttaaaaaacaatttcggatatatgaaaaatctaatttaatgggggtaatgaatatgagagaagtagtaattgccagtgcagctagaacagcagtaggaagttttggaggagcatttaaatcagtttcagcggtagagttaggggtaacagcagctaaagaagctataaaaagagctaacataactccagatatgatagatgaatctcttttagggggagtacttacagcaggtcttggacaaaatatagcaagacaaatagcattaggagcaggaataccagtagaaaaaccagctatgactataaatatagtttgtggttctggattaagatctgtttcaatggcatctcaacttatagcattaggtgatgctgatataatgttagttggtggagctgaaaatatgagtatgtctccttatttagtaccaagtgcgagatatggtgcaagaatgggtgatgctgcttttgttgattcaatgataaaagatggattatcagacatatttaataactatcacatgggtattactgctgaaaacatagcagagcaatggaatataactagagaagaacaagatgaattagctcttgcaagtcaaaataaagctgaaaaagctcaagctgaaggaaaatttgatgaagaaatagttcctgttgttataaaaggaagaaaaggtgacactgtagtagataaagatgaatatattaagcctggcactacaatggaaaaacttgctaagttaagacctgcatttaaaaaagatggaacagttactgctggtaatgcatcaggaataaatgatggtgctgctatgctagtagtaatggctaaagaaaaagctgaagaactaggaatagagcctcttgcaactatagtttcttatggaacagctggtgttgaccctaaaataatgggatatggaccagttccagcaactaaaaaagctttagaagctgctaatatgactattgaagatatagatttagttgaagctaatgaggcatttgctgcccaatctgtagctgtaataagagacttaaatatagatatgaataaagttaatgttaatggtggagcaatagctataggacatccaataggatgctcaggagcaagaatacttactacacttttatatgaaatgaagagaagagatgctaaaactggtcttgctacactttgtataggtggtggaatgggaactactttaatagttaagagatagttttagattataatatttacaaattaaatatttaattatgaatttaacctgtatgaataactatttgttattcttacaggtttttatagttaaaaataattattatctattaaacaaaaatagtgtaaaatatataatatcatgattttgaagatataaaaagcaggaagatataaaagaaagtaggtaaaagtttgtttaaaaaagagaatcaaagatataatcttatatcgtatacaaatgaagaagaaatgactttaaaagaagttttattggacaagctaaatttctcagttaggtcattatcaaaaatgaagaaggaaaagagtgttttagtaaatggagtatataaaaaaccaagtttaaaggtgtatagtggtgatttaatagaagtaaaaatagacgaggaaaaagcaaattttgaacctcaagatttaaatttacagataatttatgatgattttgatataattatggtgaataaacctccatttatggtagttcacccaacaaaaagccactatgataaaacaatagcaaatggtattagttactatatagataatcaaaaagaaaacgtaaaaataagatttgtaaataggttagatatgaatacttcagggttagttatagtagcaaaaaatgcttatgcacatcatactttatctacagcaatgagtgaaaataaagttgaaaaaaagtatataacagtagttgatggaattataaaagaaaatgagggaactatagatgagccaatttatagacctacagaagattcaataaagaggataatagatgaaagaggacagtcatctgttactcactataaagtaatagaaagactagaaaatgcaactgtattagaagtaagcttagaaactggtagaacacatcaaataagagtacatatggctcatataggtcatggaataataggtgatgagttgtatggttatgtagatgaagagctaataaataggcaagcacttcatgcatacaagctagagtttgaacaaccaagaacaaaagaaaaattgaaatttaaagcagatataccagaggatatgaaagagttaatatcgaaattaagataatggggtgatatatatgataatacataaatttataatacatgttttggacaaaaatagtgatgttccaatattaaatgactttgaaggcaaagttaatcaagaagtagatggttttttccagaaagctataaaaagaattgcaaaagatgaggatttaagaaaaggtgtttttaaagattataatgacaatttaattaaaaactgttgtgaacaaataatatatgatgaaagtacttttttgaaaaattctaaagaaattgcatcttacttgtttgacgttatgaaaattaatgctgcactagaatcttgtgatttggcaatttgcttatacactattaaagatgaaaagagtgtagcaatactgaaattagattataaaaagttgtacactcattcaattgaatttgtggatgataaatttaatattcaaatggtttcaaatgaaattggtatcccagagactttaagacaaaagcaaggagctttgattagtttaagtggtataaatgatgagtttcatctaaggcttttagataaggatgctgaaaaagaagggtcagaatctaagtttgtaacagaatttttaaatgctaaaaaaatagatgatgataagtacaagaccaaggtatttaaaaatacagctgaaaattggataactaatgctcttagtaatgatataaagcaagctgaagatgtaagaagtatattaaattatacactgaaggaaaaacatgaagttgatataaatgactttgttgataattcaattaaagatgatgagttaaaggatagctttaaagagcatatggaagaaaaaggtcttgatgaaagttttagtatagataaaaaatgggttgagaaaaagcttaaaaaaagaagtataaaaacggataatggttttgacataaaagggaatctaactgattttgaagacccaatgaagtatactgtaaagcaaaatcaagatggaactatagatataataataaagaatgttacattttatgaagaaaagtaatttatatacttagtatataaattaaatataagagcgtgtattttatatattgtaaataaatgtaatctagtctgtgcgaactctaatataatttattatgtagaagtttacacagactatttatatttgtagacaaaacgatactatttgttttcttcgatatatttacatatatcaccaatacatttaaagttctcagcttcctcgtctggtatttctattccaaattcatcttcaagggccattataatttcaacagcatctaatgaatcagcttctaagtcgtccattaaagatgcttccatagttatctcatctaaattgtctacccctaattgttctgctattatttcttttattttctcaaacattttaagcctcctaaagcagttttaattaattttaatgttagtttaatataatatcaagaatttttcaatatggaatctataaaaaataataaaattttataaatgtagtaataaagtattatttgatgaataaactttattgataacaaatataacttaggaggaaatgctatgaaatatgtaggactattactaacttcagtaggaatgtttttacttatagcagtaaatttttattataattcaataactttagatatgcaacgtatagaggattatgtaatggagaccaatttaatccttgaagatgtagctgaaaaggagagttatgtatctaatgaaaaagaagactacatatcaaggttaatgcatgtaaagaaaggaatagaaaattcaaaaacatccttcttgatagaaagatataaggagtacaaaataaaatcaatagaaagtttaatctacactatatcagaggagaaaaaagattatctggatgaagttgatagatacaataaacttggtgaaaaagaaataaataaactaatcaataaaaactttttagaagtaacttatctgtctattactacatatatttaattaaagagacaaaacttagtctcttaatgattcaaggaggattagttatgacaaaattagaagacaatatggaacgtttctttggaggatgcgaaggattttttggtaataaaatgttgataataatagttatagtattcttactattatgcacagacattttagaagacttattatgcgatgacaatatatggatatgggttatattaatagtattgttattatttaacttcgatgatggttgttgttgctaaaaaatattgattattaaataggtaaaaccagtaacttatacaagttatggttttaccttttttagttcaaattaaaaaatttaaaaaaatagtaaaaatacattagcaaaatggaaaccaaatgcatagtatatgttaggagcgaaaagctcaacaaaatatcaacaggaggtaacgtacaatgttagatagattctttggagaagaaggatgttttggtggaggaggatggtggataatagtactattcttcctattcttagcttttggagatagctgggcagaatttgacataatggcatggataccattcctaatagttttattaatactttgctgctgtggtggatgcttagaataagaacacagttattaaaaaaaggagggctttgttatgttagatagattttttggagaagaaggatgctttggtggaggaggatggtggataatagtactattcttcctattcttagcttttgaagattgctggagagacattgacataatgtcatggatacctttcttaatattattgctaataacttgttcatgtggtggattctttgatggtgaagtaggttgcggctgctaatacttaaatcattagaataaaaaaatgctggtattttataccagtatttttttattttattttttaatatgatttaaattaagaatgaatattattaaatttgttgaatatagggtataatataaaatataatgtatttaaatgtacttgcttttatggtaaaataaaaacttatataaatgtagttaaaataggaaccttcaaaaatttggttcagttttagataaatttagtaaaataaggaggatgaagatgaaaggcaatataacgataaaagatgttgctaaacaagcaggagtgtcaatatctactgtatctagagttataaatgattcaaaacctgtaactgatgaagtcaaacaaaaagttttagaggttataaaagagactggatatataccaaatccacttgctagaagcttagtaacaaagaagagtcaattaataggggtaatagttccagaagtttcagattcttttgttaatgaggtgttaaatgggatagaagaagttgctaaaatgtatgactatgatattcttttagcgaatacatactctgataaggaacaagaacttaagagtataaatctattgagagcaaaacaagtggaaggtatagttatgatttcatggatagttgaacaagaacatatcaactatatacaaaattgtggaataccagcgacatatataagtaaaactgctagaaattatgatatatatacagtaagtactagcaacgaagaagctacttttgatatgacagagcatcttataaagaaaggtcatgaaaagatagcttttataatgacgagtaaagatgatactgttttagaaatggaaagacttgctggttatgagaaagcactttcaaataacaatatagaattagacaagagtttgattaagtatggtggaactgattatgagagtggatacaatagtatgaaagaactattagatgatggaataatacctcatgcggcttttgtaacaggtgatgaggctgccataggtgctataaatgctatatgtgatgctggatataaggttccagaagacatatctgttgcaggatttaatgatgttaagatagctagaatgtatagacctaaacttactacagtatatcaacctctatacgatatgggagcagtagcaataagaatggttataaaattaataaataaggaattaattgaaaataagaaaatagaattaccttatagaattgttgatagagaaagtgttacagaaagaaaaaaataaaactattaaaatcaatcaggtagtgcctaaggcactacctgattttttatgtcaataatatcaaatttaataatagattaactaaaaataattatctaattacttaaatagtttatttttatctactcatgagggttagactttttagttttcttaaataaacctttagattttttttgttgaccacctggtgtattttttggtgcaggtgaatttgatttacctttagtaggtttagccttcttagttttagctggtttagtatctctttgattttctgcatctgagattttttccattatattatctagttttttgcgttgattttcatctaaaaatgctttgaattttgatactacttcatctcttccatctaagttcttacctatttttataagttcctccataagttcattttctgattttcctttgtaactatcagccatcttttctattttatccttgtcaatatttttttgtttagccattttttctaatgactctgtatctaattttttcataaaaaaacccctttctataaatatatattgaattatattcatactatttatatatagaaataatattgaagtggtgaattgtgagtgatatataatataaataaaaattcttatagataatatatatgcactgagctttaaaaatggaacattaaaatatgaaaaacatactttaatatagggcaattatataatataagggggaattgtcttgaataacttactatttttgattggagtgattgcattgagtaatggtaatatctctatatttgatgataaaaataaatcaaaaggaaataatagagttagaaaaaacaaaaaaaatgcaaatgataaactttcacagtctacacatggcaatttaaggtttgatgcaaatgatataaaaagaggtttaaggctcatggatttaagtgaagaagatttagaaatgggaatggaaataataacaagaactaaaaaatacatgtcaagagatgaaagaaaaatactaataaaaatagaaagtgttttagatttagttagaggaataaaaaaattaaataatatagatatggtagatacagaagatgaaacggattttttcagaaaaatggatagtgatgataaaaagaatatgatgataaaggaaattatagatgtattcccagaaaaaagaaaaaattcagttgaaaaagctataggaatgaaaaagaagatagatttatttgcagaattatttttaccagatgactttggtgaaggtggatttagtttgagctctttggcaaatataaacaatcttggtagtatgaataatctcaaattgttaggaagtcttttaagaggtgatgatagtaataatgatgatgaagacaataatgatgagttaaattatgaagacgaagaattagattgtgaagacaaagaattggatgatgatgagttaacagatgaaggtgaaatggaggataatgaagatgaattagtagaagataagaacacaggctatgaaaatatagaaaatgatgaagatatagtatacgatgaggaactatacaacattaatgagcaagaatccgaatacaattataatgaaaaaaatactaaaactagagctaagaaaaaacgataattaactaaatacataaagaaaaaaggaagaaaaagtaatgatagaataagattatctcaattactatataaaaccactttaaaaaattcaaaatttattatataataataatatgaaatcctgaaacatacgataaggcttttttaaattcaacctacaaatgaaatacgggagaccgtgtctggtaaattataacatgcctagttagtttggacgttaaaggttactggcaagtcacccacctgggagtgcctagggtgtgaatttacttagccaccggtgtttcgggacaaaaaaagtgctactatttcaaatagtagtactttttttattaatatgcatttttctactaaatacgcctaattattgataaattcaaaaagcaagtaacaattaagattataaaagcatagtattaattaggcttcaaaaagccaaagacttaataagaatcgcttacagggagggcaatgaaaaatgcaagattataaaaaaaataaaagaagaatgatgaatcagccaatgtctacaatgaatgaagaagaagtgtatacagatgaaataaattcagaagacatgagagggtttaaaaaatcacaccatcataatggatgtaatactgataataagtgtgagtgccatgatgagtgtaatccatgtaacccatgtaatccatgtaaacctaacccatgcaatccatgcaaacctaatccatgtgatgacaaatgtgaatgccatgacaagtgtaaatgtgattgtgaaccatgtgaaatggattcagatgaatgttttgaaaacaaatgtggaccagaatgttgtaatccgatatctccaagaaacttctctgtatcaaatgcagtgccatttgcaatagaggctaatagaatatttgatactatgcaattccaaacatttacagatgcaacaggtccaaatggagaaccattaacttttgaaacagaagtagtagaagtatttggttcaattccaagtgcaggtcaagcaagtgtaactatagaaaaaatatgcttaagtaatgatggaatagttatagacacaggaatgacaactttagaagatttcgatttagacccattaggagatatagtaggaagaaactgtgaaacaacttttgaatttgcagtttgtggagaaagaaacgctgagtgctgtagacaaggaaaaggcaaatcagtagcttataaacaaagaggattaactgtagcagttcgtaatttagtactagagctaagaggtagatgtggatgtacagagttcgttgcattagctttcccagcagttagagcaggaggtggatgtaagagaagagttgattatgtagaatttacttttaacacactttcagcaccaatatgcttgccagctgacggaagagctgttactttaagacaagaatatcaaactaacttaactgtagattgtataggaaaatctatattaaaattagaatgcaacgaatgttgtgaacctttctatgaattaattataccaaatgatatagatttagtactttgcttacaagaaacagttagcacattaataagtgaacaaatagtagttttagcatcaccaaatccaatccaaccaagacttgttgatactttctctaaagtatgtgatttttcgcaatgtggacctaatcatggaagtggaaagccaagttgccacagatagataggtaagatatatagacagtttaaattataaataaaaatcatctaaggaaggctaccaaagtgtataatttacattggtagccttcacgtttttataactagcgtatagattttagtgatttaaaaagcactatagtatgtaatagacaagtaaagattgatactatcgtcattgtgtatatgtatgcataaatattaagtcctggaattggaagaaatacatataaagctattagttgaattaacatgccagtaatagtatttatacttgaagctaattcttttcttattgaatgtaaaatgccagatagagtttgatttagggacataaatagtggaactaaaaacatagcttttagatattctcctgcaagtgtatttttaaatactaatatacataaatcttttccaaagaaataaaaaaatattgatgatagtatgcctacaaataaagtaagaagtatggagtatttgatttttttaattacactcttacgctttcttagagccatttcctgtgaaatagttggtattaaatttacaataagcgctgaaccaacagtaaaaggtaaaaatataaagggcattaccatcccactgacaataccatacatacttaaagattgttgataagtcattcctgataatgctaatcttgatggtatcatcatagaacttatagattgcaaaagtatgtttgacattctattacaagttatgggaatagacatttttaatgtttccatagaagaattataaaaatcttttatgcttataatatacctattgtcaaatgatgaatctcgccataagcaaataagcataaatataatattgctcaactcaccaatagatatacctaatagagctatataacaattcatagatttattatttatgtacataacaagtaaaaaaacaaataatattttaccaatttgttcaatgatttgtccaatagcagggatttttacattctttatgccatagtaatatcctcttagtacgtttgaaagagttattataactatagcaggacaaacagctagtataaatagatttaatttagcatcttttaaaaatttaagtgataaaaaagaactattgaaagatgcaactatagatataattagtgctacgaaaaatgatatatataaagttgatataaatagagcattagtattgtgtctatcgtttaaagcttttctctttgcaactagacaactaagtgcagtaggtatacctgttgttgtaacagctaagcaaatcatcaaaaagttaaaaatcatatgatagatacctaaacctgtttcacctagtgctcttgataagaatattttatataaaaaaccaaatattcttacaataaaattggatataaataaaataactgttgatagtactaaataaggtactttcaaaaaaatcacctccttatcttttaaatatattcacaaggaggtgtaaaaatttataattttataaattctggtttcaatttattaaatttagatacatatttaaatcccatattttttagtaatgaatatatgtagtcaaactcacatgcaacttgacttatatgatgtgaatctgaacctgtggttatgatttcccctcccaagtctttgtacatttgaagtatatacttagatggggttaggtctggaagattatatctataacaagaggtatttatctcgatacctttgccatcataaatagcttgtttaagagtttcttcaattatatcagaaaatagtctatcatctaaaatagtgtcataaggtgcataccttttaatcaaatctaaatgacctaagacagagtaatctttataattcttaacaatattatataaataaagatagtaattttcataaacttcatattgagttttatctttaaaataattaccaaggtataagtccattgtatctatagcatggatagaacatattataaagtccaatggatattgatgtgcttcctttttgtatgtatccattaattgagtttgaactccaaattcaattcctttttttattgatattttatctttgtatttgctttgaagagtctctaaactcttaaaataatcttcgtagacaattgaaaaagaatcatcagcatatacatcatagtcaacatggtctgtgaaacaaatttcctccaaaccgagttcaatagatttttttaccatttcttccattgtagattttccgtctgtagagaaacttgagtgcatgtgatagtcgtaaaacataaatatttcccctttttataaaaattttggtattatatatacatactaaataatatcaaatatatataaaagcatcaataaaatataaatacaatgagcggtgataaatttggaaaaatacagaatagatttaaatgagaaaaaatcaactaaatatatacagatatttaatcatataaaagaattgataataaataaagagttagtagaacatgaaaaattgcctccaataagaaaactatcaaattttttacaagtaaataacactactatagttaaggtatacgagcttttagaaaatgaaggatatgtatataaaattatagggagtggtacttttgtatcaagttcaaattcttataaaagcggtatagataacaggaaaaataagattattgtgcaaagagaagatttaattcattttgacaatgggaatccatctaatgatatgtttcctatcgattcatttaaaaatgctgtaaatatggcattatctaaagatggtagttcaatatttgaatatgatgaaggtcttggctctgaagaattaagagaaaaaatggtagagtatctaagtgatggaaatataaaaactactaaggaaaatattcaaataatatcaggtgctcaacaaggtatagatatagtttgtaaaggacttataagttattcagatgttgtttttatggaagaaccttcttacaatggagcaattgaagtgtttaaaagtagaggtgcaaaaataatatctatacctatgttagatgatggaattgatataggtattttaaaattaaagttggaaaaaataaaaccaagacttatatacattatgcctaattttcaaaatccaactggaatatcttactcaacatataaaaaaaagaaattgatagaattggcagaagaacatgatttttatataatagaagatgattttataagtgattttgtttttgaatcaaaggacaatagaacaattagaagttatgatgataaaaatagagtagtatatataaaaagcttttcaaaaatacttatgccaggtcttaggataggaattgtagaaatgccaaatgagttgttaaaaaaagttttatgggctaaatattcatcagatatatcaacaccaggtttaattcaaaaatcaatgtattactatatgaataattttgattggaagaattatttgagtcatatagagaagatatatactaataagtataaattgtcaaaaaacttgattaatgacaaattgagtggtaaattaaaagttagaaaatcttgtggaggaataaacttttttttagaattaccaagaggatatacatctcaagcatttacaaattttatgttaaacaaaggagtgtcaatgcttccaggaacttatttttttgacaatctagtggatgatagattctttaggataaatatagctcgcccaagcatggaagaactagaaaagggaatatctgtaataagtgataatatagatgagtttttttgtgaatataaaaacaagttagatataaaaagcaataaattattttattaaataaatagaggttttttaggaggaaaaaatgtttgacaagaagaaattagataggattaatgaattagcaaagaaaaataaagagggaatcctttctgctgatgaaatcaaagaaagagaaattttaaggaaagaatatttagaaaactttagagctcactttagatcaagactagatagtgtcaaagtagtttcaccagaagaatatgagcaatacatgaaaaacaataaaaattagaacttagtaggaggaaaatatgaacttaaagtacgaatttaagaatgcttgggattttgaaagaaaagaaaatactattgaacaaattatgcaatattctcgcaattatatggagtttttaagtaagtcaaagactgaaagactttcagtaaaagaaattataaaattggctaaagaaaataactatatttcaatagatgaagctatggaaaaaggaagcataagttgtggtgataagatttatgttataaataaagagaaggcagtagcactttttgtaataggtaaaaattatatagaaaaaggtatgaagattataggaagccatatagattcaccaagattagatttaaaaccaaatccactgtatcaagagagtaatctaggtttttttaagactcattattatggtggaataaaaaaataccagtggacagctcttccacttgctttacatggtatagttatattaaatgatggaacaaaagtggacatatctattggggaagaagatagtgacccagtattttgtgtaactgatttattgattcatttggctggagaccaaatgcaaaagaaactatcagaaggaattagtggagaagctttaaatatattaattgggaatattcctttagaagatgaagaaaaagaacctataacagcaaatatattaaagattttaaatgagaaatacaatatagttgaagaagacttattaagtgctgaaattgaagtagttccagctggtaaggctagagatttagggtttgataggtctatggtgttgggatatgggcatgatgatagggtatgttcatatgctgctgtaaaagctatactagaaactgaacaaccagaatttacttcagttgcattatgtgtagataaagaagaaattggttctaaagggaatacaggtatgcactcaaagttttttgaaaatactgtggctgaactgattgctttagaaggagattattgtgatattaaagtaagaagagctttagcaaatagtaaggtattatcagctgatgtttctgctggatatgacccaaattttggagaagcatatgaaaagagaaattcagcatatatgggaaatggagtagttttaactaagtatacaggttcaagaggaaagagtggatgtaatgatgctaatgctgaatttatgtcagaagtaaagagaatttttaataaaggaaatgtagtatggcaaactgctgaacttggaaaagtagaccaaggaggaggcggaactatagcccatatattggcaaatcaaggtgcagaggttatagactgtggtgttggagttttaaatatgcatgcaccacatgagattgtctctaaagtagacatatatgaaatgtataagggatataaggcattttttaatataaatttataagtaaaaatataaatgtaataagtgaataaaggctgttgtataaacaatttaatctgttgtacaacagtcttatttttatgtaaaaatagcaatttgtcacactagagaaaataaaagaaaatactgtcaaattaaaaattatttaaaaaaaaattgacaacgatttcatcttgttataatatgtaataaagaacttgttatataatgttataaaaatgttacatagggaggtgagcaaaatggatgaaaagagacaaaaaaaagaaatggatttagaagtaaattcctttgttcctttatatcaacaactatatgacaacataaaaaaacaaatagcatctggcatatataaaccaggagataaacttccatctgaaggagacttatgtaaagaatttaatataagtcgtataactgtgagaaatgcacttaatgaacttgtaaaagaagatatattatgtaaaaaacgtggtaaagggacttatgtaacaataccagagagaatagaagcaacatgtgcaggaaatagttttactaattcttgtcatcgtattaatgcaaaaccaagtaccaaaataatctctgttttaataaaaaaagcagataagcaagtagctgaagctttaagtattgaactagaagagaaggtaatatgtattaaaagacttagattaatagatgaagtacctgttatttttgaagttgactattttagaatagattacatgtttttattaaaagaagaattagaagataaatctttaatggaggttatatctaataatataagcacattacctaaacgagtagaaaatatatttgaagtaaaacattcaaacaaagaatattctgactatcttaaatgtgcaagtaatatgccactattgaaagtaagacaatcggtgtatacagaaaataatgatgtcttatattacaatgagcaatttataagaagtgataagtacaaatatgcagtatcagcagaaatataatctatatttagtaggaggatgaagtatgaaaaagataatattagcatctcatggagatttttcaaaagggcttttaaatgcagtaaaaatgatagtaggagatttagcagattgtgttagttcgtatggtttgtaccctggacaaagtgcttcagattttgctttagaattagaaaaaacaatatcagaagatatagaatgtgaatatataattttatctgacttatatggagcaagtgtatgtacagcaatgttaagattaactaatctacataatgttaagttattttctggaatgaatttgaatatggtattagaacttcttacaaggttttctgatgaattaacagttgaagatatagaacaattagtggaagaatctagaagaggaatacaaagcgtgacattacaaattaaagaagaagaagaggtattttagtttatgaaaaaaaagggaatattatcagtatttaaaagtaaaaaaccaattatagcaatgatacacttaaaaggagatactccagaagatatctttgaaagagctaaaaaagagattacaatctttgaagaaaatggtgtagatggaataatgttagaaaattactatggtaattattatgatttagaaagaatacttgaatatgtatcaaaagctaatttgtcaataccatatggagtaaattgtttaaatgttgatactatgggatttgaactggcaacaaaatataatgctagttatatacaggttgattctgtagtaggtcatgttaaacctagagacgaagctactttagaagaattttttaaattacaacgttcaaaatgcccagcgtatttaattggaggcgtacgttttaaatatcagccagtattatcagaaaatgacgttgaagaagatttaaaaataggaatgacaagatgtgatgctatagcagttacagaaaatgctacaggtcaagaaacatcaatggaaaaaatagaactgtttcgtaaaaatttaggagactttccattggttatagctgctggagttacattagaaaatgcaaaaaaacagcttgaattaggagatatggcaataataggaagttactttaaagataattacaaagattttgggaatgttagtgtagaacacgtaaaaacattcatggatgaaatcaaaaaaattagggaggaattataatgattaaattagtaagagtagaccacagacttatacatggacaagtagcatttacatggacaaagtttttaagcacagactgtatattgatagcaagtgatgaattattaaaagatgaattaagaatggcagggcttaaaatggctaaaccatctaatgttaagttagtaatgaaaagcatagcagattctataaaagcacttaactcaggtgttactgataaatataacttattgatactttgtgaatctgtagaagatgtttatagacttgctaaagaggtaaaagctattaaatctataaaccttggtggaacaaaatcagatgataatcgtgaaaatatatctaaagcagtgcatgtatcaaaagatgatataaagatgattaaagagttagattcagaaggcgtaaatgtatttgtacaattagttcctgatgatgatgctacaaatgtaatgaaattaatataattttagggggatgaaaatggaatttacacaagttattttgataactctaattgcattctttgcatatatgcatagttttgtaggttctacaatgcataatagacctatagttgttgcaccacttgttggtttagcactaggtaatcttcatacaggtatagtaataggttcaacattagaattagtatttatgggtgcatttcctgttggggcaagtaatcctcctgattttgtgtctggttctattattgccacagcgtttgtaatattaacgggtcaagatgtatcagcagcagttgtacttgcagttcctatagcaactctagtattgcttatagataacttcttaatgacagtagtacttacatggggagctcatattgctgaccgttatgcagaagaggggaatattgaaggcgtagaacgtgtgcaattattatttggtataggaaataaattaatattagcaataatagtaggtataggattttcattaggtgttccagtaatagaaaaaatactttcatttataccatcatatgtaactcatggaatggatgttgcagcaggcgtgattccagcaataggttttgccatgttagctaggatgatgcttaataagaaaacagtagcatttttattattaggatttatattggttgcttacctaaacataacagtaacaggagttgcattgtttggattagcaatagctttaatatatgttaactttgtaggagagaaggaggtaatagtagatgacaacgagttctaagaagttagatacaatttcacccgatagtaaaataacgaggaaagacttttggaaatgctttagaaggtcattgacattagattcatcttggaactacgaacgtatgcaaaatatagcatatgcatacatgatggcaccaataatccgtagattgtataaagatgataaggaaaagaaatctaaggctttaaaaagacatttagaatttatgtcagttactcctcatataagtactcttttggtaggtatatctggagctatggaagaagaaaatgcaaagaataaagaatttgatgctaatagtataaatgctgttaaatcaagtttaatgggtccagtttctgggataggagattcatttttctggggaacattaaagcttatagcagctggagttggtatagctttagcttctcagggtaacataatgggaccgattttattccttttaataataaatgttcctcattttattatacgctatatatgtctagataaaggatttaagtatggaactcaattctttaaagatgtgagtagttcaagtatagtttcaaaagttatggaagcagcttcaatgttagggcttatggtaattggaggtatgactgcatctaatgtaatgttaaaacttagtgttaatgtaggtagtggagaatgggcagagcctattcaaacttacttagaccaaataatgccatgtatgcttccagctatgatattcggtattatgtattggttattaggaaaaaaggtaaagacaactacgatattaatttcagttatgattatttgtatagtattagctgctattggaatagtataaataaaaaaatcccaagttcatttgaacgagggattttttgactaaattaaataaaaaagaaagatggttcataataatttataagcatttatgtgatagttataattagcttattaattagttataaacccaaaattaagcactactttattaaagttattatattataatttcgaaatactcacataatctgtttagaaatttatcttctaatggggaaaaagttttctttttagagtaaataaagaaaaattttctagtaaaatcaacaccctttattttataacattttattttacctgcattgagataatcaatagctgaaatgtacgatataaaggagactccaagacctaatctaaccatttccttaatagcctcatttgattctacatgagctattacatttaatttacttactggaaagttatttttactaagtgtgtttagtattaagtttcttgtacctgacccttcttttctcataataaaatttagataagccaattctcctatatcgatacaattatttttattatcaattttaaaatctgaaggagtgataagaacaagttcatcatctaataagtctaggtactctatttgaggattattgattttagaaccaactaatccaaagcttattcgttcatttaaaatttctgatatagcatattgagaatcataatggcttatggaaaattttacatctggataactcatagaaaaactcttcataaaatcaggtaaaatataagtttcaggtatggaactacatgctatatctataataccttctatttttcctgaatattcttttatatcataaattgcacgtttgcaattattcaatatatatatagcatgttcataaagaatttcaccagattttgtgagtgtaataactttgttgcttctatttataagaacagtttccaactctctctctaaattctgtatgtgtgcacttacagtaggttgagttaaaaaaagttctcttgcggcctttgaaaaactctgatgttttgcaacagcaacaaatacttcaagttgtttaaaatccattatttaatcctccttaaattatctaaaactattataacatatttgataaattaatagtcaaaggtgatttttaaaatagaaaacctttaaatattcatggagtttttgattgtttaggaataatttggtataatattgtaaggtacttacaataaaaatatcgtaaattgaattttcaaaattcaactttaaagtgttttttattacagaaaaattacaattagcttcttaatcttattaaattcaaataaatattatataattattttataatataataaatataattattgaaaaaagagataactgtaaattgagatatagataaatactataaaatttaagaaaggaggattgatttatgaagttaaaaaggtcattagtttgtgtaactattttaggtattatacttgttggatgtcataaagaaaatactaaagagaaaaatcaagtagcaagtaaagcaacacagcaaaaaactatgacaaaagttcaaaatgatgttaatgaaattatgaataaagattataagtacattataaagaatatgggtataccttataatacattttattatataaaacctaaagttttaaaagaatcgaatacaatgcaagatataaatacatcaagttatatgacattagtttatccaaaatatactggaaatgatgaactagatggaagtgctttatatgttgatattaacgaaaataaagttgtcaatgttgaaaccaattctttctcatcacaaggtatatcagtcattgatgctgaatctagtgttgtgattgaaaaaagtgaccatgaaaaatcggctgtatcactagaaaattttagacgtattgacctgggagagtatgttggtgttgaagagtctagaataaatgaaattgtaggagatgcgaattatgatttaacagcatataatcatgaaggtagtaaagtagttaagagttatagattgaaagaagataacaaaatattaaaaaaagaggtacttacaataagtattgtggataacaaaataaaatctataaaaactattgaaagtgataaaattgtaaaaataataaaaggaactttattagaataaaatattctaaagcatatgatgctgtttcaagatagaaggaaatttctagctgggaacagtttttttattagatttataaaatttgaactgcacttatagataactattagttataattaaatataagataaaagtatttccaacttttataatctataatatattacatagaaatatcttaaataaaaaatatattggggagtatttaaaatgatagaattagaagatgccataaaaattattgaaaaaaatgttttaccaataaacagggtcaagatagtaaatcttatagatgcagtaaataaagtagttgcagaagatatatattcaacaattgatagtcctccatttgataggtcaccctatgatggttatgcatataatgcaaattctgaaaatagaaatttaaaggttatagggactttgtatgcaggagaagtatttaataaggtattaaataaaaatgaagcagtgaagataatgactggtggaaagataccacagggtgcaaactgtgtaataaaaaaagaagatgtaacggttataggtgatatgataattttaaatgtaaaattaaaggaatacgataattacatatttaagggtgaggatataaaaaaggggcaattgattattaataaaaatcagaatataggatatgatggtattggagtattagcaagtcttggaatatccaaagtaactgtttatgatgatttaaaagttggaattttgaatacaggtacagaactacaagatataaatgagactttagagaatggtaaaatatacgatagtaatagatataccttatattcaagattattaaaacttggaatacaggcagatacaatatgcaattgttctgatgatatattggagttagaaaaaaaggtaaagaatatgttacagagtgtagattttttaattacaacaggtggtgtttctgttggagataaagatttaattccagatgtattcaaaaaaataggggcaacagaattattttggaagataaacattaaacctggtggagcttgttatgtaggtatattgggagaaaagctattatttggtctttctggtaatccacatgcagcaatagtggtatttgataatgtgatagttcctgttattgagtatttaacatataagaagggaatacatcatataaaagctatatttaaaggagaatttaataaactttcaaataaagatagatttgtaagtggaaaactatatacaagtgaaggtaaattgtatgtagagctaaatgataagaaagatgcaaaagctagattatctgcaactctaagaagtaattgtatgattaagattaaaaagaatgagacaataaaagaaaatcaattagtggagattgttattagatagttttatgaaaggacacaattttatgtataatatattgtcagttgtctcatattcaggagtaggtaaaactacgttgattgaaggcataataaaagaattaaataaaaaagggtatcgtgttggagttattaaacatacctgccatgattttgatatggatgaggaaggaaaagatacttataaacatagaaaatctggggcgagaaaagtctgtataatatcagataaacgagtagcatatattgaagaactaaaagagaagaatccattatataaaatgattcaattatatgaagatatggacttgattatcatagaaggatataaaaattatagatttaaaagattggaagtaactagaaaaggtaagtatgaggatattttatctaataagtctgatttgataggtattgtcagtgatatagaatataaattgaatattgaacagtttaatttaaatgattataaaaatatatcaaagtacatagagtcttgtataaaaaatgaaattttaagtataagcaatgttgaaataaaaaacatattaaaagaataattttaagatgttcttcttatataaaatgatataattatttatataaataaagatataagaaatttatcaattttattttgagttataaaatattaaagaaattgtaggaggacaatatatgaaaaaaatattagtagcatgtggagcaggaatcgcaacatcaacaatagtttgtgacagagtagaaagattggttaaagaaaataatatacacgcagaagttgagcaatgtaaaattgctgaatgttcaacaaaacaagaaggtgctgatttaatcgtatctactactatactaccaacaacttatgatatacctacaataaaggcaacaggatatataacaggtataaatacaacagcattagataaaaagatattaaatgcattgaagtagttttgtgtttataaaaaaaatttagtattaaatatagagttgtatctttataaaattttaaatatagagatatagctctttttatgctgtttcaagtatacaactatatgatataaatcttcaattttatgaaaaagattgttattactttgtaagtttataaaagatttaaagttattgttatgttatactaatttatgggtattttttagaagtactatatagaagtactaataaaggagggatttaatacttatgataaaacaatttgtcaaatattataagccatataagaaaatttttacactagaccttatagcagcttttctattttccttatgtgatttagtttatcctatgataactagaaatataatggatgacgttgttccaaataaaaacttaagaatgttagtagtttttgcagtagcacttatacttatatttatagcaaaagcagggcttaactattttatgcagtattggggacatgttattggtgtagatatgcaagctgatatgagaaatgaggtatttacacacttacaaagacttccaaatacgtattttgataataacaaatctggagtaactatgtctagaatagtaaatgatttaatggatataacagaacttgcacatcatggtcctgaagatttattcatttctatagtaatgttggttggttcattctttatacttatagatataaatattcctcttacgcttataatatttgctatattaccgtttataatttggtttgcaatagctaaaaaagataagatgaatattgcttttatgaagagtagagttactataggtgatgtaaatgctactttagaaaatagtatagcaggtatgaaagtaactaagtctttttgtactgagaaagaagagttaaataagtttgtaagaagcaataaattatttagaagagcaagacaagattcttataaggtaatggcagaatattactctggtatgaatttatacatggatatcttagagtgggtagttgtaatagctggtggttattttacttatataggaaaaattactttgggtgattttgctgcttatatactatatgtaaaaatgtttatacaacctatgaaaaaattaataaattttacagagcaatatcaaaatggtatgacaggttttaaaagattcatagagataatggaacaagaccatcaaaaagaagctaaaaatcctattgaacttgaaaatgtaaaaggtgacattgagatagaaaatatatctttcacatatgaagataagactcaagttttggataatttaagtttatctataaaagctggtaagactatagcattagttggaccttctggaggaggaaagactacattatgtaatctattgccaagattttatgaatttgataagggtgatataaaaattgatggaaagagtataaaagatgttagtttaaaatcattgagaaaaaatataggtatagttcaacaagatgtatttttatttacaggaactataagagataatattctttgtgggaaccctaatgctacagatgaagaaatgatagctgctgctaaaaaagctagaatacatgactttgtagagactttgccagatggatatgatacttatataggagaaagaggcgtaaaattatcaggtgggcaaaaacaaagaatttcaatttcaagaatctttttaaagaatcctccaataataatattggatgaggctacatctgctttagacaatgtaacagaaagagaaattcaagagtctttagaggaattaagtaaagatagaacaaatttagttgttgcacatagattgactactataaaaaatgctgatgaaatcatagtattgacggataaaggaattgaagaaagaggtactcatgaagagttagtaaacaaaaatggagtatatagtaggttacacaataactagtatacaaattttacaccatagctaacatacgcattaaacttacaaacataggatatattaagattcataaagacaattcattttatatttatgagatgttttatgaataaaatgtatcctatgttttattttttgcaaattacatttaattctctttgtaagaatagagttaaatagccaatggtcaggataacgtttttacaaaaagaataatttagaaaactaactttaatttatggaatttatcgaattttatgaaaaaaatcgaattttgacttgaaatgtttttcaaaagtagtaaaataatggataactatacatacattttataaaaatacatttattatgaggggggattttgtatggaggcaataacagctttttgtctagttttaatatcactgacgataggagatatagtttcagcaaaaactaaagcttttgttccgtcggtttttgtatcagcaattatatttatagtaggattctggacttttttcccagaaaatattgtggacttagccgctttaggaacaccattagctcaattaggtatgcttttgttaataactcatatgggaactatgatgagtattaaggaattagcaggtcaatggaaaacaatagtaatagccttggcaggaatagtaggaatatgtgtaggtgctttggcattagggacaatagtatttggatgggatacagcagtaatagctacacctcctcttactggagggctagttgcatctataatgatggcagatgctgctacagcaaaaggtcttgcaagtttatcagtacttgcaattttgatgtatgttgcacaaggatttgcgggttatcctattacagcattaatgcttaaaaaagaaggaaaaagacttttatcagactttagaagtggaaaagtaactgtaaatacagatgaagaaaaagttaaggatttacctgaacaaaaaagcagatttaagataattccagacttaccagaaaaatatgatacgacatatatgataatacttagattaggatttgtagcatggttagcagtacaatttacaaatcttacaaatgaagttgtatcaagatatgttatatgtttaatatttggtgtaatagcatcagaacttggaatagttgatagaaaaccacttaataaatctggttcatttggatggttaatgacatcattgatggcttttatatttgcaggattagcaaaagctacaccagcaatgcttgttgaaatggcagttcctcttgtaggaatcataatatttggtgtaataggtatgggaatattctctattatagtaggtaagcttttaggtgaaagtaaagaaatggctttttcagtttcgcttacatcactttatggttttccaccaaactatatattaactgaagaggcagtaaaggctttggctgaaacaccagaagaaaaagaatttttaatggataagatgcttccaaagatgcttgttggaggatttactacagttacaatagcttctgtagtaatagcaggtatctttgtaaatctaatatagtatttaagtgataaaaagtattttaaataagaagaatgtgtactacttggaggtatggaatggatattaaagaaataacaaagagttataaagactatgtaattaagcttagaagggaatttcatgaaaatcctgagaaaagtatggaagaagttagaacatcaaagagagttaaagaagaacttgataaaatagagataccatatgtatcagctggaggtacaggtgtaattgcaactataaaaggagctaatccaggaaagactgtagcacttaggggtgatatggatgctctacaagttgttgaatgcactgatgtagaatacaaatctaaaaatgaaggacttatgcatgcttgtggtcatgatggtcacacatcaatgcttctaggggcagcaaaagtgttaaatgatattaaggatagtatcaatggaactgtaaaattattttttcagccaggagaagaagttggtaaaggtgcaagagctatgattcaagatggtgctatggaaggtgtagatagtgtgtttggaatacatctttggactgatgtagaatctgggactatatcggtagaagaaggaccaagaatggcttctgccgatttctttaaaattactgtaaaaggtagaggtggtcatggttcacttcctcatcaaggtgttgatgcagtgcttgcaagttcagcaatagttatgaatctacaatctatggttagtagagaagtaagtcctctggaaccattagttgtgagtgttggagttttaaattctggaactagatttaacgtaattgcgagtgaagctgtcttagaaggtacaataaggctatttaatccagagcttagaaagcaaattcctggaattttagaacgtatagcaaaatctacagcagaagcatatagagcagatgctgaattagagtatgggtacttaacaccagcagttataaatgacaaagaatgttcaaagatagctacagatgcagcaattaagctatttggagaagactgtataacactatttgaaaaagtaacaggagcagaagatttagctgagtttatgaatatagcacctggtgcactagcatttgtaggagctagaaatgagtcaaaaggtgcttgctatcctcatcatcatggatgctttaatatagacgaagatgctctagaaattggaactgctttatatgtgcaatatgcagtggatttcttaaataaataattttaatatactataaagaaaaagcagagactaagtttatatctctgcttttttattgtgtatattttttataaatattgactatataaaatatatatgatagcataaagaaaatgataatcaatatcaattaaaaagaaggtgatttatttgaataatgtaatatttgcatttttgataacattattggctggtttatctactggtataggaagttgtatagcattttttgctaaaaaaacaaatactaagtttctttctataagcttaggattttctgctggtgttatgatttatgtttctatgatagaaatttttcctaaagcacaagatgctttgacaaaatctatgggagagaaattaggaagttggtcaactgtaatagctttttttataggtatggctatcattgctgttattgataagttaattccacaagaagaaaatccacatgaaataaagaaaatggagaatatagaagaaaagaatatcaaaaaaaataagtctcttttgagaacaggtatatttacagcaatggctatagcaattcacaattttcctgaaggattagctacatttatatcagctcttgatgatgttacaatagctatcccgatagcaattgcaattgcaatacacaatataccagaaggtatatctgtatctgtaccagtttattatgccacaggagataaaaagaaagctttttattattcctttttatctggtatgtctgagcctttaggagcgattattggatatgtacttcttagaaattttttaaatgatataactcttggaattgtatttgcaattgtaggaggaattatggtattcatatcactagatgaattattgccatcagctagagagtacggggaacatcatttatctatttatggattgattgcaggaatgggtgttatggctattagtttattactatttaaatagctttttaaatatatgattgtaacctaaaattagtatcaaaatgatataattatttaaatagatttttaagctatttaaaaatatcattttggagaatgagtgctatggaaaagaaaataaaattcaaatttgactggtatagttcacctgataagatagagaaatggttagaagatattgaagctaaaggatataatttatataagataaataaatttggaggaatattttattttcataagggaagtccaagaaaaataaaatacactgttgattactactatgatgtagagaataattattttgatgaacataaatcaaatggctggaatcttgtatttaggagtattggtagttttatgggtacatctgcatggtatatatggtcgaaagaatacaaagacatacctcctaaattatatagtgattctgataaaaaaaacaaagtaaagtcaattttatttatgaatatgtttatattctttatgttagtagtaatatttatatatttattgaatattgaaataagaaatttatatagtggttatggagcatctgtaactgctattgtactacagattatattgttgattttatatgcagtacaattatataggagattaatgtattatttaaggcttaaaaagtttaaataaataaaagaaggtgtcctaaaattatttttttaatattttaagacatcttcttttgttagtaaagtactgtttttaattatagtaatttctgtctttaaattgaaatatcaaataatagttgtattggattgagtattgataaaaataatttaaaaatgttatcctaaagtatcagatatacaaaattatctttaaatatattataaatattttaattgtattaactagaaattatgtaaggaggcattttatgattaagatagcagtttgtgaagatgaaaaagaaacacaacttttaatagaagattaccttgagaatatattaaaagatataagtatagaatatgagatacaaaagtatatatctggagaagagttactggaaagtaatttaaaagatatagatatattacttcttgatataaaaatggaaaaattaaatggaatggatactgcaagaaagattagagaagtagacgatgaaatggaaataatatttgtaacttcattaatagattatgtgcaagaaggttatgaggtaagagcttataggtatttactaaagccaatagagttggaagaactaaaaaaacatgtgctaacttgtatcaaagatattgaaataaataaggaaagtcatattacaataaaaaataagtctaatacatataagatttatttaaatgaaataaaatatatagaagttcaaaaaaaagatatgctaatacacacaataaacaagaattttgatataaaatatagtttaggtaaaatagaaaaagaattaaatccatataaatttataagatgccataaaagttttatagtaaatttaagatatgttgaaaatataaagcctaatgctgcaatactggaaagtggagaagaggtacctattagtagatatagatataaagaagttaaggagaaatttttaaaatttcttggtgatacaatatgctaaattttatgaatgagctattagtagttttatctatatttatacagttttctataatgaacggaattttaatttataaaaaggatagtaaaaaaaatgaaaaaatagtattctatattgtcttgtttcttatttatattataattcagataagtagattatttaatggaggaagttactttagtaatataaactatttattttatatattagcatttattgcttggggaggatactataattatttttataagatggattatattaagtattccattttcttttatctatttagtgtatattataaatgtttggatgctgttatatatagaatactattttttgcaattacaggtaatgttatttcatctaaagaatccttattagtacctcacttagaatctataaaaattcagatatatagtaatttaataattattcttatatatcttgtatttagcttttttaggaagtctataaaattaattagccaagataagagaaattatgtatatttattatttgccttattagctaatacaatgaatatgcttgtaaattatgtattaaaaaaattagaacggtttgggtcattacattcagaaggatactattttgataattttgttaatccaaagttggtaggagctagtagtatatttcttatattattgtttaaagaaataataaaagagaatagattaaaatctcaagctgaattaataaaaaataagttagatatgcaatatgcgcattatttaagtattcaagaatctcatatgcgagttaagaaactatatcacgatataaataaccacatttattgtatagacaaccttagaaacaatagcaaagaaattaatgaatatgttaacaatttaaaagatgaaataaaaacatttaaatatatctataatacaggaaatatgatattagacattataatcaacgaaaagagtgaaatatgtttaaaaaaaggaattaaatttacttgctctataaatttttcaaaagtaaattttgtaaaacctatagatgtgtcaagcatattttctaatattttggataatgcaatagaagcatgtgataaaatagtggatgaaaatattaataaatatattagaattaaaggaactataacaaagtcattttttgtacttaaatgtgaaaatagtaaactaaatcagcttacttttaataaaaatatattgttaacaaacaaaatggataagttcgtacatggaataggtattcagagtattaaatcttctttacaaaaatataatggagaattattatttgaaaatagtatcgataaatttatactaaatatatatataccattggagcaagatactgacagttggggcgattaagttaccagttgggacatatgtattgatacaaaaaaataaggatgttatcttttaataacaaaagataacatccttatttctgtattaaggagcttataattttactaatagtaagttataagaattggataggaaggtgatatgtattgaataataaatctttaatataaagaaaatataaatatattctaatgcaatgaataatactttagagcggttagtgtgatgggaggattgtgtatgaaagtaaaaaggaatataaatagagtggcaataattgtggctttaaatcttagcttagcattgatggcaggatgtatgtctcctgtatctgataagaacttaagtagctcagaacaaattagtaaagattcattgaaagaacaagttgaagataaaaaagatgaatctatcgagctatttaataattactcacaaaagattaatgatgcgaaaggtagagaagaagtaaaaaaagatttatctcaaagattttcgaaagctataatagacagtggttatagtattactgactcaaaatcagatggtagctttgtagtatctataaatggtgctgaaaaaccacctgaaaaaaatattcgaagtttattctattctatgtctgaagacgataaagaaggaaaagtaacaatagatattctctgtgctaaagagtatccagaagatgataagttatctgagagtgataaatatattaaatttatatacaatttatttaaatcattgactaatacgaacttaactgagaaagaaattttttctatggttgaagaagaatttaataagggagtaggtgttgtggagcttccttatatgaaggatatacatgttgaagttaacaaagttaaacaatcaactaaggttttaaaactaagtctagtatacaaatttgatatttcaaatcattagtatattagaaataactataacaatatagaaaatatatcatagaaaatttttttagattttataaatttaacaaaaaaagtattaatatataggtgttcaaggtagatgaaaaaaaaagttattttgcttccattttatgctaaaggacagtataatataattaaagtatgttataacatacaaaaatgtagtatatattatccaaagggggattttaaatgagtcaaactaatagaatagaagcatttagacaagaatatattaattctaaacctatgatatgttgtgaaagggctagaatttttacagaatcacataaaaaaactgagggagaagctatctgtataagaagagctaaagcttttttggagacatgtaaagaacttcctataaaaatctttgaaaatgaattaatagtaggtacagcaggaaaatttagaagaacagggatattgacaccagagttttcttggcaatgggtagacaaagaaatggatacttttgataaaagaactcaagacccatatgtaatatcaaaagaacaaatagaatttataagaaaagaaatatttccatattggaagggaaaatctttggaagaagttttcttagcaagaatcccagaagatacagctaagatattagtagatacaggaataatagataatgattctaagtggagacaggcagttggtgaagtaacaccagattatcaagatatattgtttgtaaaaggatataaagggattaaggaagatgcagataaaaaaattaaagaattagatatatcagtttcagaaaatattgaaaagatagatttttacaaatctgtttctatagttgcagagggtattatgacattggcacaaagatattcaaatcttgcaaaagagatgagtaagcaagaaacagatgaaaagagaaagttagaacttataaaaatttcagagatatgtatgaatgtaccagcaaaccctccaactaatttttatgaagcaatacaatttgtatggtttgttcaattaggtggtattctatcagaaaatccattggcattaaatttaggtagatttgaccaatatatgtatccatattatgaaaatgatgctagagaaggtaaaataactgaatcagaagctcaagaattgatagaagcactttggattaagttatcagaatgggtatggactatatcagcaaatacagcaaattactttgcaggatataatcaattccaaaatcttactgttggtggtaaaaagagaaatggtactgatggaacgaatgatatctcatatatgtgtttaaaggctacagaaagtgtaaaaactcaccagccaggattaagtgttagagtgagtcaaggagcaccagataatttcgtaatggcagttgctaaattggtaaaacaaggaactggtttccctgctatacacagcgatagtgcaggggcacaaatgttattacaagatggatatgatgcagaagatgctagagattggagtaactgtggttgtgtagttcctcattttagaaaaacaggacagtggacttcagccgtaaatatcaattttgcagcagctttagaatatgctatgaatgaaggtaagagtagattaactggagaaaaaatggggttagatacaaaaaatatcacagaatttacttcttttgaagaacttaaggatgagtttttaaagcaattagcatatcttgtaaaaagttctgttataggaactactgttgctcaacaaattcataaagaaatggtaccaagaccatttttatctacttgtgtagatggatgtttggataagggagttgatttaagtaaaggaggagcaaaatataatataggtcctgtattaactggtatagggttaggtgtagtttcaaattcattggcagctataaaaaaattagtatttgaggataaggtgactacgctagaagaattaacaaaagcactaaataatgattgggaaggttatgaagaattaagaaaacttgcgttggatgttcctaagtatggaaatgataatgattatgtagattcattagcaattgaagtttctgatttttattatactgaaactagaaaatacaaggatatttttggctctaaatttaatagtgcatttatgggtatatcaaactatgtaccaactggaaaaatcgtaggtgcaactccttgtggaagaaaagcgacaaaacctttgacagagggagtttctccgtttgttggtactgatacaacaagtccactagcagccatgaaatctgcatcaaaaataaatcatgatgttcatactggtggaacacttctaaatttaagactgaatcaagatttggtggaaactgaaagaggacttagaaatctaacatctatgattaaatcatattttgctttaggaggattccatgtacaatttaatacgatatcaaatgatactctattaaaagctcaagaaaatccagaagaatataaagatttattagtgagagttgctggatatagtactcaatttgttaatttatcaagagaaatgcaagatgctataatagctagaaattcacatagcaatttttaattatgaggtagattatgagtaaaaaaggtagagttgtaaaagtacaacatttttcagtaaatgatggagatggaataaggactactatatttttagaaggatgtaaattaaaatgtaagtggtgttctaatccagattcctggagtaacatagtaaaattaggtgttatgaaagataaatgtgtatcctgtaatagatgtatagatgtttgtcctcaaaatataagttcactatttgatagaacgcaaataaataataaatgtgatttatgtggagagtgtatcaaggtatgtcttaaagatgccatttgtataatgaccgaaaaaatgagtgttgaagaaatagtagaggaagttgaaaaggattttatatttttctttgaatctaatggagggataactttttctggaggtgaacctacacttcagattgattttttaagagaattagttgatattttttatgataaaggcataaatattgcaattgaaacttgtggatattttgattggaataaggtaaatgatgtatttgagaaaatagaccacatatttgtagatataaaatctatggatgataatattcataaagaatatacaggagtaagtaataaaattatattagataatatatgtaggctttcaaagttgaataaatctatggttataagagtgccaattatttatggagtaaatgatagtgaagaaaatataagaaatactgcattatttgtcaaacaaaatgttccaggaggcaagatggagttacttccatatcataaatttggaatcgataaatataaggcattagggcttgaagattatatatatgaatttgatgaaatttgtaacaatcatatgttaaaattaaaagagatagtagaacttacaggagtaaaaatcatagaatacaaatagctatcaggaggattttaacatggataataaatttcctaatgtgggagaaaatttaaggttattgagacaagaaatgggcataagtttagacaaagcttcaaagatgacaggtgtcagtaaagcaatgcttggacagattgagagaggtgaatcaagtccgacagtatctactttatggaaaatttcatctggatttaaaataaattttactacactattaaatgaaaatacaaatacctatgaggttataaagaaagaagaagtagagcctattgttgagcaaaaagggaacatgaagttatatccaatatacccttttagccctcaaagaaggtttgaactttttataattgagcttgaggaaaactgtactcatgtttcatctacacatagttatgttttagaagagtatgtactcgtaatagaaggtaaacttgaccttaatgtggatgggaaaacttatattttagagtctggacattctattaggtttgatggaactttagagcatatatataaaaatttaaataaaggaaaaactatatttcacaatatagaggtttatagataattttatagttatccttttctaaaataaatgaaaattttagaaaaggataacttatttttataatgtcgaaaagatttatatgtatgtgatgatgttattgttttaaaaaaaacataaaagcattataataatattaacaaaatagaataaagaggaagagaatatgattataaaggtttcaatgacagtattagtattaatattattgtatattctgtataagtatgaaactcagcatatagaaacgacagaatatactattttcaacaaaaaaattccaaaggaatttgataactttaaaatagttcaagtgagtgatttacataataaggtgtttgataaaaataataaggtattgatagataaaattgaatcattaaacccagatgttatatttataacaggagatttagtagatggagaaaataaaaattttcaagttgcattagatttaatagataatttggttgaaaaatatgaagtatatcatataattggaaatcatgaacaaaaatctttaataaaaaagtataaacatctatataaggattattttaaggaactatattcaaagaaaataataaatatggaaaatgaatctgtaagaatatatagaggtaatagccatcttaatttatatggtttaattataccattggaatgctatccatatttatttgctaataacaaaaaattagaactaagtgacaattttgtagaagacaatctaggtaaagttaatgaaaatgaatataacattcttttagcacatacaccatttttctttgaaaaatatgcaaaatggggagcagatttggttttagcaggacatgttcatggaggtataataagaataccttttgttggaggtgtattatctccaaatagagagttctttcctaagtatgactggggaaaatatgaaaaagataatagcactatgattttaaataaaggcttaggaggctcaaaagttttaattaggcttaattgtaaaccagagatagttaagattacattgaagtatgagaaataagattttatataacatatataaacatcaataacatataaataaggttgatgttaaatccatttaaacatatataatgaccaattttgaataattgttgaattaataaaaataaagtgctatttttagcatagaatatttaaactatgggggggagtaaagaatcatgggtgatacaagtagattttatgagtctgtaaaaaataaatatccgaaattaaaagatggaactagggttcatctgtggccaaaagaaaacattataattggtcctatttatgatgaagaagatggatataaaaaaagtatcggaaatgtggatagcttaagttggaagcaaattgttatactggctgaatgtgatgggaaaaatactactgacgatataataaatatattatccaatagatatagaaatatccataatatgaaagaaaaagttatggaattttttatgttttatgagaatgtatacttaacgtttgaagatgatatacagacactatcaagtgtatttgagataacaggaaataaatcatacattactcctttgtactttactatagaaatagatggagataataatacaaatgattatttttctgaaatcacaagtttattgaactgcatgtatgagaaaggctgtagatttatagaggttattggtgaggatattttaaaaaataaaagtatgagagaaatatttcaatatatgttagaccattttgatttaattgtggtaactaaagatagctttactattgatagaagcttaataaaagaattagataattatcgtcataaagtgatatggaaagtatattcaaaaaatgatgatacacgtattaaattaaaagaagatataaaaataaccagtttaataaaaaggggtcacactgtagtaagaggagacagagaaaaagcaataaaaatagaagatatgaggtttaaagatacaaaggagaggttttcaaaatatggagcagagtggagtcatttatatatttcttctgatggtagtgtaaaatcttattcatttcaaaaagataaaagagtctatttaggcaatatatttaacaattctgttgaagaaattttcttagagatgcaaaataaaattgacaaactagaaattgtgtatcaataagggtaaagtttaagatttatataagatttatagattgtttatttaagtttgtgtcaataattataatgaggtgaaatgacttgttaaaattattggacaaatttttttatgatgttttacttaaattttggctgtttatgatgctgtggatttttagagaactttttacaaatttcaaaatgactaaaaaatttaaatttcataaaatatttatgtaaaaatcatataaaattcatatagcatatgtatcatatgaggtgtagaaagactagcttaaaaaccataatataataccctattgtaatgataaccctccctcacatcctcaaatagagttatcattacaagaattaatccataaatttaaaatttatggtttttttttatttaatttgttttattatattagaatatgatttattatagaatatataataagtaatatagaatacattaattaagtttttgaaatgtaactatactaataaggaggagtatttatgaatgtaaataatcacaagtgcccagagtgtggtgaacatagtaaaaagtttgaaatagtagaggaaaatgaggattgtgtaatatttgaatgttacacttgtggaactatatctatattaaagtattgtgagaactgtaaagaatttgtatttgtaaatattccaaataatgtggagacatatgagtattgttgtggaaaatgtaataataaaatttaatataatataaacatatgtaatttcatatatcatttataccaatctcatataaaattcatatataaaatgtattatataaatataggaagaactagcttaaaacataatataattaccctaaatttataatgacaactctccctcacatcctcaaattatagttgtcattatagaataacttggctgtttcaaaaatgtgaaatcattttagaaacagcttatttttttataaaaataaagaaggcaacgggaagccttctttcgtgtaaaaaaagtttaattttttgttaagatttgtttgttattttatattacttttataatatgtttttatttggtggttggcaatggattttgcacaactggtcattattaatgtaaaagtggaatattattaataaataataattacaaaattgtaatctttatttattaaataaatgagtaaaataatatattaatgggtatataattaagacaatactagtttggggaggataaaattatggattataaaacaatcatattaaatagaaagtctgttagagaatataagaacatagatattaaagaagaatatcttagtgaaattaagaaatactcagaatcttgtaagaaactagttccagaaatagatgttgatgtaagaattatgaataaaagtgaagtttttaataatttagataaagtagcagggtacaaaggaaatatgatagattctccaagttatattataatattatctgacataaaagataattacattgaaaattcagggtacataggagaaagtataatctttaaagtaacagaacttggaattggttcttgttgggttacttttgaagatggaaaaaaggtaaaagaaaaacttggaattaattcagataaagaggtaacaggaattatagctattggatatggagaaaatgtaagtaatgctaaagtattaaatgctacaaaaactgggcaaaattattcaaaatctgatatgcaagttgtaacagataaggggtctactagactaggtgtagaagatgttgtttatatgaacgaatggggaaatgttgcaagtatagaaatcttagaagaaagagcacttcttgatgcatttcactatgcaagattagctccatctacattaaatagacaaccatggagatttatagttgatggaggcactgtagttttagctgttagaaaagatggtcatactaatttatatgaagaaaaaatagacattggtatagttatgctttattttgcaacaataataagtgcaactatgtttgatttaaaatggaatttaggtactccagacaaagattataaagtgccagaagactataagatagtaggatattgtaatatataagatagtttaatacttaatttaactacacttaaattaatttttataaaaagttcaataatattttataataaaatgttattgaacttttttattgtataatacaatttttatatttattgtattgattgaaaaatacttatgaatttaaatgcttacaattttgtgcatgaatagagaggtatattattttattaaactgtataatttgcttggaggtaatatcaaatggaatggataaataaattaaatcaagctattacttatattgaagaaaatctcgaaagtggagtggattatgcagaagcagcaaaaattgcatgttgttcaacctttcattttcaaagaatgttttcatatattgcagaagtaccattatctgaatatattagacgaagacgtatgactaaggctgcatttgaacttcagaacagtaacatcaaaattttagaactatctgagaagtatggttacgattcaccaacatcttttaatagagcttttcaaaatatacataacatttctccatctgcagctagagcaaagggtgttgttttaaaagcatatcctaagatgacattaagcatttatgtaaaaggaaatgtagaaatgcaatatcgtattgtagaaaagaaagggtttcgtattgttggtataaaagaaagtatgaacatgattgtagaagagtgctttgagaaagttcctaagttatgggctaaatgcataaaaaatggaacaattgataaactttcagagttaataaataacgaaccttgtggattgcttggagttagtgtgtgtacaaatagtaagggtttagattattatattgctgcaccaacagataagcctgtattagaagatactcgtgaatacttaataccatcaggtacatgggcagtatttgaatgtgtttctccaatgccaaatgctctggcaatacaggaattgcaaaaaagaattattactgagtggttaccaagttctgggtatgtgtatgctaacttaccagatattgaactttatcccaatggcgatatcaatgctcctgattatactacagaagtttggattccaattcagaaaccaagttaaagttaatgaataacattaaatttaataaacaacatgaaattttaaaattacaggctgaaaatagtctgttatttttttgtaaatatggaaagcaagctttacataaatgaaatatagttgtataattatggaaagtagactttccgtagttgagatattaaagggggatagatgtgaaaaatagattagaagaaataagaaaagaaagaggcataaaacaagaagaacttgcttctattttgcaagtatcaagacaaactataggttcattagaaaatggtaggtataatccttctatcatcttagcctttaagatagctagatactttgattaaaaaatagctacgcacacttgtgactttagtcatgagttagtagctaaaatagtcagcatatagggaaacttatatgtagagataggatagaacctatccaatactacttgaattgctaaaaacccctaaagctaaccaaactaaaacataaggatgaaataaacctaagtgtgaaagttacgaaagtagaaaaaattggttagatggtataaggttaaatcctaagtactttaaaatgggcaatcagcaggtaagctccgaataggagaaacttcaacgactattcctcttgagggaagtacactacaagctattggtagtggaagtgggtagaccttaacggataatgccgaaggataagatatagtctgtgcttacatgaaagtgtaagaagttcataagagaactgcataggtagtagcgaacttatgtgaacgacaacctcaaaaatgataaaagttaagacttacggttcttatatatgttatttaaaaataaatataaaaaaccttcaaaatacttgttttaagtaattgcatattttaatattatgataggtgatgaaaaatggaagttactcatggtagaggatatgcatataatatgtcaaatatagacatccagtattatggggagacatctttggaatcctagttatttcgttgctactgtatcagaaaatacagaggagcagataagaaaatatattaataatcagaaaaaacaagtaaagtgaggtggcagtagtggaaaaagcttataagtttagaatgtatccaaataaaaaacaacaagagttaattaacaaaacttttggatgttgtagatttgtatataataagtatcttgctaaaagaatagaagtttataaaaacgataaagaaacttttacttataaacagtgtagttctgatttgaccaatttaaaaaaagaattaaaatggcttaaggaacctgacaaattttcactacaaaacgccttaaaagatttagataatgcatataaaaaattctttaaagaaaaagcaggatttcctaaatttaaatcaaagaaaattaatagattttcatataaaactaactttacaaatggaaacattatgtattgtggtcaatatataaaactacctaaacttgatatggttaagataagggataaacaagtacctaaagggagaatacttaatgctactatatctaaagaaccaagtggtagatattatgtatcattatgctgtactgatgtagacattgaagcatttgaaaatactaacaatcaaataggtttagatttgggaattaaagaattttgtatctcaagttgtggagaatttatagaaaatcctaagtattttaagaagtcattaaacaaacttgctaaattacaaagagaattatcgagaaaaacaatcggtagtttaaatagaaataaagcaagattaaaagttgcaggacttcaagaacatatagctaatcaaagaaatgattttctacaaaaactatctactaaattaataaaagagaatgatattatttgcatagaagatttacaagtaaagaatatgattaaaaatcgtaaactatctcgcttaatttctgatgtatcatggtcagaatttattcatcaattaaaatacaaggctaattggtatggtagacaaattgtaaaagtaggcaaattctttgcaagttcacaaatatgcaataaatgtgggtataaaaacgaggaagttaaggacttaaatataagagaatggatttgtcctagttgtaatgaaactcatgatagagatataaatgcaagtataaatatattaaaagaaggattaagattaataacaattcaaaataaataacgtatgtaagaaccgtaggaactacggggatggcctgtggagaattagtaagacatattttagtatgcaaaattctgtgaagcaggaaccctgtgactttagtcatgggaggttcagatgagtattgaagaaatatttatttatgaggaggagtaaaaatgaaaaagaatatgttatatcttggaatagtatattttatttgtggaattttacttgttttattggctacgtttactgagttttcatttgaggcttttatttggggattatctggagctgctttaggtccaggtatatgtatgatttttcaatatatgtattggagtaagcctgaaagagcagtagattatgaagaaaagataaaaaaccaaaggatagagatgaatgatgaaagaagagttatgttacgtgataaagctggacgtatcactaatcaaatcatgtcctatgttcttgtaattcttatatttattgtttctatattgagtgtattttctgtaatggtaataagcaagtgggttttagttgttcttggattgcttattttatttcaatttatttgtagtgttgttgtatacaataaattagataaaaagttgtaataaaaagtttaaattcacaataaaaatattggatttttaaactttagattcttaagacagttttagaatatatctttatatacaattatataaatttataaaaagccataagtatacattgtattttgtggctttttgtggttaaagattatagatactttaaataaaaatactgcagtactttatttgaaagtaatttttatataaattcatattaatagtcttggatggtttcttttattaaaggttgcagtagataaagaattaattaagattgcatatcatataaattataaaattttttctcaaccaatttatcataaagataagtgatggtataagaatttttgtgattttatttttattgttaaagagatgtactaaattatcatatagattaggaattattgagaactattttttgtataaaaaggagctgattcaaattgttatgctattcccttgtcaatcatttcttgtatcattccagcaaatccaaagctattatacataaataaaactacattcgcattactgtttttaattatctcatcataggtcatatctatattttttatatatctaggatctagtatttcgagttccttaaaagtatcagccaacatccaagtcataggtgcttggtacgaatctctaaatataagggcctttttattagttaaagagcttgaatttctaatcttaagtatgtgacaatcacaacctctcatataagctccaccatagtcccattctcttttatcttttaattttgcttttatgatattttcattaatctcagtatttttagtaccattactaataaaatatttgtaatttgcatcacttatttcaacatagcttatagactcttttttcttaagtggatatcccatctttttattataactacctataaagaccttgtcatttacatatcgagtactgtatctttttaaatgactatctatttctgatttagataagccaaggtctaatttatcaagaataaacttatattcttcaaatgctcctaatgaatttccgtgatggtctgtttttaaaaagaatttttctctctctttttcggtaaaacttctataaaagtaatcatctatatctaagaaatttatgtctgttaactgcttttctaagttttctttgttaatatctatattatttttaccttctataccacttggatacaagtgcttaagcatatttgtcttatgaggaagtgaaacaaagtaaaaatctttttttctatttaacttactcaagttattaatggctttggagtaagattttatatgataatcagataataatttagcaaagttgcctaatagccatccatctttagttagataatacttttgtttaatctttttattttgactctgcataatatggacattaaaaacttctttcattgtaatataattttggttattattaaagataattaagaccatcaataatatcactgatactataggtagactatgtcttttgttcaatatgctacatctccttacttttattttgattagtttatttttaccaaagcaataaaaaataaacaataaaaagcctctattaaattttgaatttaatagaggctttttatttactactttattcctttatctatcattgaatctatcattgaatcaaacccagaactattatacataaacattacaatatctgcattactttcctcgattatctctttgtatgttttatatattgagtttatatttctagggtctgctatctctacttctttaaacatatcagcaaataaaagtgttgtaggagcctgatatgaatctctaaatattagtatttttttatctactaatgctttagggttttttatagttaatatattagttttagctcctctaatgtatgcaccaccataatcccactctttattatctctttcagttgcataaacttctttttcttctttttcttctttttcttctccatttatatcaaagctataatcttggttatcttttgtcatataaactacatattcattttctttaattagcatatctatattttgattataacttcctataaatttcttatcagtaattatagactttttatagctactaaaatgcttgtctaaatcttgcttagatagacctaagtccatatttgatgccatcattttaaagccttcaaatgctccatatccagtccaatgatggtcagttttaaaatataaattttctctttctttatctgaatagttacttaaaaaatactcatccatatctatatatttaattaaatctggatttaatctatttttaaaattctttaaatttatgtctatattatccatattatcaacatatttaggatacaaatgttttaacatattagttttatgtggcatcattgtaaaatacacattttttcccatatctttacttagattagataaataattaatggatttttcgtatcgacttaattgtttttggtctaaaatttctggaaacatacctaatatccagttatcttttcctagataatagttacctaccttagttttatttaaattagcctgagtccttgtatttattgatatcatttcatctctaaatgcaaaatggtcattaaaatattcttcaaacttggctataaagtcacatttttttaaattttctacagtcggaaattttgcaagatttctattttcagttatacttaattttttctttggaagtgtgaagtttagtatgaaaaatccaaatactataattaaaaatgaaatggcaacaatccttggtttttttttactcatgtttatacctcccaattagaatctaaaatataagaatggattataggttgagctacttaacattattattacaataaacatacaagaaacaatgaaaaccacattagtaacttgatataatgtgctatttaatgtatttttatttttcttaattaataatgattttacaacttttacaataggagttgatagaaggattgccccaacaattatataccaatattcaattataaatacattgaatgcatcactgataaccggataatttccagcaccaaacataatacctataaatttaatagctgctggtaaatcatcaactctaaaaaatacccatccaatcatgactataagaagtagatatatgtgtcttacaattcttggcatcttatatagaaatttttctaagaatgctttttctactgatattaatattccataatatagaccccatataataaaagtccaactagctccatgccacatcccggttaaaaaccatactacaaatagatttctatatagttttgccttagagactctacttccacctaatgggaagtacacatagtctttaaaccaagtacctaaagatatatgccatcttctccaaaactcagatactgtttgagagatatatggatagttgaaattttctaaaaactcaaatccaaacatcttacctaaaccaatggccatatcactatagccactaaagtcatagaatatttgaagtgtatagcaaactatacctagccatacctcaagtcttgataaatctccagctgacttattaaatacaccatctgcgattacacctaattgatttgctagaattactttttttccaagaccaacaacaaatctgtttacaccttgagtaaatttgtcccaattgtgttctctatactcaatgctatctgcaacagtctgatatctaacaataggacctgctacaagctgagggaataaacttatgtataatgctaaattagctaattttctttgaactttagcatcatttctatatacatctattacatagctcattatttggaatgtgaaaaatgagatacctaaaggtaatttaacctcaggtatagttatatctgtattgaataaaaaattaatattatctataaaaaaattgctatacttaaatacagcaagaatagatatattgtaaataacagaaagcacaacccacatttttttatttttactgccagaaactttaataccaaatatatagtttactattattgatagtatcatcaaaaaaatatattttggttctccccatgcgtagaatgcaatacttgctagaagtaacataacatttttatacttaggatttgccaagtaatagcaaatgagtgtgactggaaagaataaaaataaaaatattaaactactgaatatcatattagactcctttcttaaccaaatcaattatatctttatctaaaatatatagcaaagtaagtattttcaagttttaagtacttaattgtatgaatttatatgtgtttttacaagtttaattaatctatatgtaaattttgacttttcatataatttttttaaaatgatgtaatattaaaatgaattaataaagctattataataaagaaaaatcaaggacatattacttaactatatgtgtttacctttgattgtgcctctatacagtctattaagatagatgttgtttatatctataactgtaaaaagaactctttattaagtattagaatcagaatactttcagatatgcttttatcgcaagtttgttttaaatgacaaatactttaaaataatatcgaatcattatactaaataattatgattgattataaattttattttaattattgcttccatagtttccatttgttgtaaaaaagttactatttgttgaaattggtatattttttagatattatctatgtctaataattaaatttataaatatttctttattttttatattaggatatttttgagaaatgaaatacatcttaatttactttggtatgaatatttttatggatattttatcacaaaaaaataacccttttacaactaagggttactttttttctttattttttcttattatatcattattttttgtttatttcaatattttgatattttatccattatagtgaaaatatatcttgagcttttcagattttataaactttacaaaatatacttaaaattaacacattttatttacattgtattacacttaattcttatttttatcattccacaaataaaaaagaataagataataaataaaatacttatcaccttattctttatttaattattttacaatgaaaaatctaaactactttttaaatagcttcctcttccattaatttatttgtatattactgatttaactcttcaagtaactaattgattgttgcaacactttatcctaaactctagaaactttataaactacatctctagcatttggtaaatttccatctggaacacctacagcaataccaaatggtacagaataaccttctagtatatcaagtagttctctgtattttttatttgtatcaaaatttttagagattgggaaaaaatcaatatgataagaagtatggatttattaagtgaatacataaaaaatcctactttgtttagatatattttaggagttcaagaagttatgactatggtatttatacttatacaaggctagaaataaagatgaaagaatattacaataaaaaaactctttagtatatactaaagagttttttttattggtgccgctgatgggactcgaacccatatggtttcccgtacgattttgagtcgtatgcgtatgccagttccgccacagcggcttatattttaaatccaaactacttgtatatcctaccagattttccaagaatatgcaagaggaatattgaatacaaaatactcatcaaactgtaaaacattataaaaacttatgaatcaacacagttgattttgaatccattgtatttaccaattcaaccattcgggcatgtcatgtatattattatagcaaaaaaatatattgtttgcaacatatttaattttaatatactattattattatgggaatattaaataacactatattggtatataatatatatgttacaaaaatagataatttttaggagtgatataatttggaaaaaaaattaattataatagatggaaattcaataataaacagagccttttatgctctgccagaaatgaataataaagaagggttaaagaccaatgcaatatatggatttacaacaatgctatttaaaatgatagatatatataaaccaacacatataagtgtagcctttgacagaaaagcacctacatttagacatttagaatataaagagtataaggctggaagaaagggaatgccagatgaactggcagaacaattacagccattaaaagaccttttagataaattcaaaataaatagattggaaatagatgggtatgaggcagacgacattataggaactgtttctaaaaaagcagaaaataatgggtataaggtatacatagtaactggagacaaagatgctattcaacttgcttcagataatacaactactcttataacaaaaaaaggagttggagaagttgaagaatacaactttaattctgtaattgaaaaatacgagatgactccagcacaatttattgatttaaaaggtcttatgggagataagtcagataatatacctggagtacctggaatcggtgaaaaaacaggtataaagcttataaaagagttttctagtatagagaatttaatagagaatacagataagcttaaaggtagtgtaaaaaagaaaatagaggaaaataaagaaatagctattcaaagtaaaagacttgcaacaattataagagatgtgccaatagaagtggatttagatagtatggtttttggcgattatgataaagatgaacttttagataaatttagatactttggatttacaagtctcttatcaagattagttgatttggtcgattcagatgacacagaacacgtagaagaaaaaatagaaatattaaaattaaaagatacagaaaaatttatagatgaagtaaacaaaaaaggacaagttattttaaaaactgttagaggacaaggtaatatacttgaaaaaaatataatatatatttttataagtgtagatggagaaaaaatatattatgtagattcaaatgaagtgtcaaagttagatagtatattttcaaataatgaaattaaaaagtatggatataatttaaaagatgattatatatctttaaaaccatataatataaacttagaaaatatgtattttgatataacaatagctgagtacttaatagattcaacttcatctacctcatatgattgtagtgcaatagctatgaagtatttatcaaaaaaggttaaatcaaaagaagaattattaggaaagggtgttaaatctaaaaactatgaggatttagaatttgaggatttagcagagtatatgggtcaaataatatgcacagttaaagaaacaattcctatgatggaaagaagtctaatggatatgagtatggatggtcttttttatcatgtagagatgcctttagtagaagtcttaggtcatatggagtatgaaggtataaaagtagacaaaagtatattggatgaattgagtgtagagtttaaagaaataatagctacactagaaaaggaaatttatgaattatcaggagagccattcaatataaattcaccaaaacaattgggtgttatattatttgaaaaattagagcttccaataattaaaaaaactaaaactggatattcaactaatgcagatgttttagaaaaattaagagataagcatccaataatagataagataactgagtatagacaaatagtaaagttaaattctacttacgttgaaggacttttaaatataataaatccagaaagtaatagaatacattcatcatttaatcaaactataacgactacaggaagaatttcatctacagaaccaaatcttcaaaatatacctataaaaatggaaatgggtagaaaaataagaaaagtgtttattgcagatgataactgtaagttggttgatgccgattactcacaagtagagctaagagttcttgcacatatgagtcaggatgaaaatatgatagaagcatttaaacatcatgaagatattcataccaaaacagcttcacaagtttttaatgttcctatggaagatgttactagtgaattgagaggtgcagctaaagctgtaaactttggtattatatatggtaaaagtgactttggtctagctgatgatttaaatatacctgttccaaaggcgaaagaatatatcgaaagttattttgctaaataccataaaataaaagagtttatggacacaacagtagaaaaggctagtgaggatggatatgctgtaacaattttaaacagaagaagatatataccagaaataaagtcaagcaattttatggaaagaaatagaggaaagagatttgcaatgaatgcaccaatacaaggaagtgcagcagatataataaaaattgctatgataaatgttcataaaaaattggaagagaacaatttgaaatcaaaacttatactacaagttcacgacgagttgatagttgaagcaattgatgatgaaatagatatagttaagaaaatagtaaaagaagaaatggaaaatgctgtaaatatggatgttcacttagatgtagatttaaatgtaggtagttcttggtatgagacaaagtaggtgattttatgttgatattaggacttacaggaggaataggctgtggaaaaagcagcctatcaaatatatttagaaatcttaatatttctatagtggatgctgatattatatccaggaagatatttgaggataagttgttattggaaaaagtatttgtccattttgggcaaagtataaaaaatgatgatggaactctaaatagaaaagctcttgggaaaatagtttttagcgatgaagaaaaacttaaggaattaaatagcttgactcatccgcgaataagagaaaaaataataagtgaaatagaagaattgagaaaaaaaggcgaaaatatagtagtattagatgcagcaatattggtagaaagtggttttttagatatggttgacaagctattagtagttacttgcaaacaagaagtacaaattagtagaatacaaaagagagataattgtagtaagcaggaagcacttagtaggataaattcacagatgagtcaggaagaaaaatccaaatatggtgattatataatagataattcgggaacaataactgaattagaaagtaaagcacataaatttattgagtacatgaaggagaattggcgtgaatagtaagaaagtattgattctatctatttttataatcttatttggggcactattaatggaaagcaaagtaatacataaatttttatatcctaaaaaatattcagagtatgtagaaaagtattcaaaagaatttaatttagatgaaaatatagtttacagtgttattaaagccgaaagtaagtttaatagttctgctgtttcaaaaaaggaagcaaaaggattaatgcaaatattagatataactagagattggggagcagaggaactaaatttaaaaaatgtggatattttcgacccagagactaatataagacttggctgttggtatttaagtaagttatacaaagaatttggtaaattagatttagtgatagctgcatataatggtggttcaggtaatgtgaaaaaatggttagaaaataatgaatatagtaaagatggcgaaaatctacatgatataccttttaagcaaacttcaaaatatgtagaaaaagtaaaaaataattacgaacattataataagatatatggcaagaaaggaaaaaactaatgaagagaataaaagtcttaacagtcgttttagctataactcttatggtagctggttgtagtaatactaaaacaaaacaaagtagtagtgattcaagtttacaaagtcaaagttctatagatgctaagtatataaacttaacaatggtaactccaaaaactataaatcctataactaatactgataagtctgttggttatataatgaatttagtttatgatagtttatttactatagatgagaactacaatgtaattcctcaattagttaaggagtataatatagctcaggatggaatgagtatagatataaagctaaaagatgcaaagtggcatgatggaaaaaatgttacttcaaatgatgtaaactatactattggtttaattcaaaaaagtgcagatagtccatataatgaatttactaaaaatatagcttctgtgaatattaaatcagataaagattttacaataaaatttaaagctagatatgctttttcaattgatagtttaatttttccaatcgtatctcaaaatcatttagattcaaaggatgtaaatgacaagaataataatatgataggaaatgggaaatataaaatagaatcatatacagaaagagaaggaatggttttatctgtaaacaaagattactatgaagaagttccaaagaccatgaagaacataaaagtaggtatggtgcctaatgaagaggcaaggacatctatggttatggctcttgatagtgatataaccaatgttacattaaatgatttaagcaagtttcaagaaaaagagtttaatataacaaaatatcaaggaagagattatgagtgtgtattatttaattataataatccattttttaaagatgttaattttagaaaagcaattgctcactctatagataaagatagaattattagtgaaggttatatggatgatgctactccagttaattttccacttaattcaaaatcaaaatactataatagtgaaatgaaggatttagagtttaataaagataaggcgatagagtgtcttgctaaggtagaatatgcaaatataaactcagtaaatcaaaatgacaataaagtaaaaaatcagaaaaaatcagctaaaaagaactcaaagaagcttacgccagaagaagaagcaaaagctaaaaaagcagaagaagatagaatcaaaaaagaagctgaaaagaaaaaaaatagagaaaaagaggaagtaaagaaaagtctttctgaaatgaacttaaagataatagtaaacagagataatagtgagagaataaaaactgcaaacataataaatgaaaacttaaaagctataggaataaatagtacagtaaatcagctgtcagataaggatatggaaaatgctcttaattctaaaaattatgatttagcattagttggatggaaactatcaattataccagatgcaagtagtattatagcaagtagtggatatactgatgataagctaaatggatatatgtctgcacttacaagttctacgtctgaaattgaaacaaaaaaagcatacaaagatgtacagacatatataaaagataatgcaacatttataagtttagctgtgagaaacaactatattgtaagtaatagtagattaaaaggtaaaattactccaaatgattttgatgtatatgagggaatatctaatttagatataaaatcgaatgaatcaaattaaatgattaatttctatttaaaaagtataaactatatgatagaatacccttatggggtataaggaggtaattaaatgaagaagaaactattagtagaaggtatgagttgtggtcattgtgtaaaccatcttaaaactgcattaacagaagatatagatggtattgaagttttagatgtggatttagaaaataagtgtgcatctgtagatatgaaagatgatatatctattgaaaaattaaaagaagtgatagcagaattaggatttgaactaaagggaattgaatagaaattgataaactaaaaaaaggcctctattgggggagtaatagaggtctaaaaatgggggagattgagtatgtttgattttacattactattatctccccttttaaattaatatatacataaaaagtaaaaaaattttgtaatgactcacatttcttgagctttttgaatatactataaatagctaagggagggagtatcatggaatctaggggatataaagaggatttaaaaaaaatgatacttgatatggcccacaaagaacttgagagttatgtatcacaaaaaggagcaaaaaaatactttgaaggtaacttggataagattattaataataatataaaaaaattcaatcaaagtattggtcttaatagagtatatttaaaaatgttaaaaaagtgtgcatatcaagaaagtgtaacttcaatatcaaggactataaagaaagaagcattatttaaatcaaaaaaagagctatttgctttttcagagtacttaaaacttgatattaacaagcgactttcatataatcaaattttaagaaaaatatcaagatatatatactataatagaagttcatatgctcaaaaatacgttgttttcaaaagaggagatgaagaatatcttttagaaccagagaaaataaaagatgaattaatatcaagctataggtcaaagactagagaagatatgaggtcaatagcaaaacttttggatatagaagtagaagatgattataatgctgaagatattagaaaaaaagtaataaattatattatcaaagaaaaacttaaaagttagagttttaaagaataagttctgccaatttgcatgattaagtataacttgggtataaattttttgtgcatttgaaagagcttattctttttttgacatattcttttaaataatttaccaccatttggtaattggtcatcatcattcaaatttttaacttaatatgatttaaataaatttataataatgatataatataaaaaaaataaaaattggagagtgatttcaaaatgaagtttaatttttgccataacaatttcaatgttactaacttagaaaaaagtttagatttttataaaaaagctttagggcttaaagaggtaaagcgtaaggaagcagaagatggaagttttatattagtttatttaggagatggtattactagtcatacattagaattaacttggcttagagattgggacagaccatataatttaggagacaatgaatttcatctggctttagaagttgaggagtttgatgaggcaaaaaaacttcataaagatttagattgcatatgttttgaaaatgaaagtatgggaatttattttatagcggacccagataattattggattgaaatacttcctaaaaatcattaattttaaggatatgtttataatttctttacaattaataagagaataagttatcattaaattgtagggactaaaaatggataataatgttatgaatttatgactataaaaatttgttggggggagtgatagtagtgaagaaagctatagcagctttaggaattggggcagtagcagtatctgttagctccataaatgcaagtgctcttgaaaagggaacagtaacagcaagtgccttgaatataagaagtggaccaagttctgattgtgataaggtagcaaaattatacaagggaaaaactgtagagattttagaaaagtctaatggatggtataaagtaagggtatcgagttctgttgttggatggggaagcgcaaaatacatatcaacaagtggttcatctgaaggtacatcaaatcaaaataatccaacttcaagtgggacaactattagtggaaatggtaaagtaaatgtgagttctagactgaatgtaagaagtggtgcaggtactaactattcattagttggtaaagcaaataatggagatgtagtaaagttactagaacaaagcaatggatggtataaaataaaactatcaaatggagttactggatgggctagtagccaatatatctctaaaacatcagaggatgttggaacgaataattctagtaattcaaatagtactaataattctgataaaaaaccatctagcgaagaatcaattgaaggcaagaatggtaaggtaacatctgctgtgagtttaaatgtaagaagtggtcctgggacaagctattctataataggaaaattaaatggtggagatgttgttgaattaaaatccaaaaataatggttggtataaggtaaagttatcgagtggaacaattggatgggtgagtgccagttatatttctgagactaatgaaggtacaaaagaaaaaccaaattcatcatctaaccaaaattctcaatctaatagtaactcaaagccatcatttactggaaattcagataaatctacagcaaaaggttcaacaatcgtagattttgcatatactcttattggaataccatatcaatggggagcttcaggacctgataaatttgactgttctggatttacacagtatgtttttaaacattctgtaggcgtttctattcctagagtttctagagaacaggctaattttggaagtgcaatttctatggggaattatgcaccaggagatttagtttattttgacactgatggtgatggaacaactaatcatgtaggtatatatgtaggaaatagtaaatttatccattgtagtggtactcagactaatcctaataaggttaaagtggataatttaactagttcatattggtctaaagtattacttggtgcaagaagatttgtttagtaagtacaatttcttattaaaaaattagaagaaataattatttatattcataaattgtgactcttaaaaatatactttattaataatataattttgggagggacaaactaatgaatagaagaaaaacgatatacagaggatttaataataatagacataagattgatttacgtaaatatgttataacgattgcttgcttgtgtctaattggctattattcttatacaaaaataaaagatagcaagatattggagtatgtatcggctaaaataccatttctaaataattcatcagatataacttataaagatatatctgatgaattaaattcaataaaaaaagggaaaaaatctaaatcacaaaccaattcagatgataaacaagaaactaatccagaaaaagcggtaaataacactaaagagccagaagaagtcaaattagctactatagaaggctgggatatgtacactattcaagttgctgcaatagataataatgatgatttgaaaaaaatacagacatcattagttaataatgacatacctttttcagttatggagaaggatggagtaaaaaaaatacagacctattcctcttttgatgaaaatgatgttagaaagcagataagcagtgtaagaaaggtgtttccagatgcatttttatcacacttagatgcacctatgttgtctttagagtatacaagtaactacgcttatatagagagtatatctaaagaattaaataaattaataacaaactttaaagaagaatcaagtttttggtcgaatgctgaaaataatgtagatatggaaaaatataatactattttgacaaatagaaaggcaatatcacaaaatatatcaaaagaagctgaaaagattgactattctgaaatgcgtttatttaaagataatttaatagagtatgtaaagaatgtgaatgaaaaaattgatacagcttcaaaagcagcaaatgaagaaaaatatagtgtaagtaaaagtctgcttttatcatccatgcaggagtactctatgtttataaattctataaaataaaatacagaaaatttggactttagaaagctatatgaaaaggattgtttaattaagcaatccttttcctcagtttgacttaatatagaggtattgatttataaaataaattataaaaatacggatatttttttaacaattgttaagattttttaatatatatagtatacttatagaaggcagaaaaaatgtttttttatagataagggggtaaaacaatgaaactcttaacttttaagggagggatacatcctccatatagaaaagagtactctaacacaaaggcacttgaaaaagctcaagctccaaagatagtttacattcctcttcagcaacatataggggcaccagctaaacctattgttgaagttggtgatgaagtaaagtttgggcaaaaaataggtgaacaacaaggttttgtttcatgtaacgttcattcttcagtatcaggtaaagttattgctattgaacaacatgaagtaccaggaggttcagctcaatgtgtagttatcgaaaatgactttaaggaagaattacatgagagtgttcaaccaaaaggtcagttagaggatttgagcaaagaagatatagtaggtatcataaaagaggcaggaatagtaggtatgggtggagctacattccctaaccatgtaaaagtatctcctccaccagatagcaaggcagaagtagttatattaaatggtgcagaatgtgaaccatacttaactgcagaccacagattaatggttgaaaatccagaagatgttgtgtttggtttaagagcattaatgaaggtattagatgtcaaaaaaggatttataggaattgaaacgaataaaccagatgctatagaagcaattcaaaatgtagctaaagactatagtgaaatcgaagttgttggccttcaagtgaaatatccacaaggagcagagaaacaacttatttatgcgtgtacaggcaaagaagttccatctggtggattaccaatagcagcaggtgcagttgttgacaatgttgccacagcagcacaaatagctaagtctattaaaacaggtatgcctttggttgaaagaatcactacaataacaggtagttgcatcaaagagccaaagaacctaataacaaaagttggaacattagtttcagaaataatagaacaatgtggtggatttaaagaagataagaagattggtaaggttataatgggtggacctatgatgggaatagctcaatatactactgaaatagcgactaacaaaggttcttcaggaattttatgcttggatgaggaagaatcacgtactccagatattcaaaactgtttaagatgtggaagatgtacagatgtatgtccatcattcttacaaccacttttcataagtgcatattctttaaaagatgactatgacacagctgaatatcatagagcaatggattgtatagaatgtgggtcttgttcatttatttgtccagcaagaagaccattacttcaatctataagatcagcaaagagagaaataggagcaaagagaagaaagcaagctgctcagaaataaagaaagttaagggggaaaaacgatggaaaataagttgatagtatcatcttctcctcatgtgagaagtaatgaagatacttcatatataatgaaacaagttattatagcactccttccagcagcagtagcaggagtatacttctttagacttaatgctttgagtgctatgtttttttgtatacttggtacagtaggtactgaatttttatatcaaaaatttacgaagcaaaaaagtactataggagatttttcagctgttgtaacaggattattattagcatttaacgtaccagcatcacttccttggtggatgtgtctagtaggaggaatatttgcaatattagtagttaaaatggtatttggtggaattggatgtaactttgtcaatccagcacttgctgcaagagcatttttattagcatcattcccagtagcaatgactgcttggactcaaccaggtgttaactggataggtaaaaatttagatgcagttactacagcaactccattaagctttttgaaaaatggagcagcaggactggcagacctttctagcaatggaattagtcttgctgacatgatgatagggaatattggtggatgtataggtgagacatcagcaatattattattattaggtggagtatacctaatgtataaaggcataataaattatgttataccagtattttacatagcaactgtatttatattaacattccttttaggtggatttaatataactttcgcaatatatcaactgtttgctggaggacttatgttaggtggattcttcatgcttacggattatacaacttcgcctatgactaaaaaaggtcaaataatatacgctgtattagctggtcttataacaactgttataagaatgtatggtggatatccagaaggtgtatcttactcaatactattagtgaactgtcttgctccacttatagataagtttgttagaaatagagtatttggggaggtggctaaataatgaacagtatggtgagattaggtggtactttacttgctataagtgcaatagctgcattagctcttggagctactaatcaggttacagctccagtaatagaacaaagaaatatacaagaaaataatgaacttagaaaagcagtccttccagaagcaaaagaatttaaagaaatggataaaagtacatataaagaccttggagatggtcttatagctgaagtgtatgaaggtttagatggttctgaagtggttggatatactttaaaagctaaaccaagtggatatggtggagaaattgaagttatggtaggtatatcatctgaaggtcaagttacaggtgttgacattggtaatatgtcagaaacagcaggtcttggagcaaaagctaaggatgatgcatttaagggtcaatacaaaggaaaaactgctgagcctcttgaagtagcaaaaggaagtacaacagcagataatcaaatattagcaatatcaggtgcaactattacatctacagcagttactacaggagtaaatgctgctatagatgttttcaatagtgctcttaataaataaggagggttaattatgaatttagctaaagtatttaaaaatgggctaatagatgagaacccaacatttgttcaagttataggtatgtgtccaacactagccgttacaacttcagcaataaatggaattggtatgggtctttcaacagcagcagttttaatatgtgcaaatttagttatatctttaataagaaaaattacaccagataagataagaatacctatatttatagtagttatagctacatttgttacaatagtaggtatgcttttaaaagcatatgttcctgctcttgataaggctcttggtatatatataccattaatagttgttaactgtttaatattagctcgtgcagaaagttttgctttcaaaacaggagctatgccttcaatagttgatggtgtaggtcaaggtcttggatttactgttgcacttacaataataggtgcagtaagagaattacttggaaatggtagtttatttggaatgacattatttggagcatctttccaaccagtattaatatttatattaccaccaggtgcattcttaacattaggattcttatttgcaggatttaataaattaagaagtaaaaaagcatagtggaggtgtaataaatgaatttaatacttttatttttaagtatcgttcttgttaataacgttataacatctcaattcttgggtatatgtcctttcttgggagtttctaagaaggttgatacagcagtagggatgggagttgcggttacgttcgttttaactctagcttcaattataacttattttatacagattttattagtaaaaactggaactggattcttacaaacaatagcttttatattggttatagcttctatagttcagttcgttgaaatggtaattcaaaagatgagtccatctttatatcaagcattaggagtttatttacctcttataactacaaactgtgcagttcttggtatagctctagttaatgttcaaaaaagttataatttagtagaaacaataataaatggatttggagccggagctggatttactttagcaatagtaatattcgcaggtataagagaaagactagagttagctgatataccagaagcatttaaaggtttccctataacgcttatatcagcaggtttaatgtcaatagctttcttaggatttacaggacttataaagctataaaaaagaggggtgaaaatggtgatacttacagctgtattagttttaggaattatgggcttaatcttcgggatagtactagatttcgcatctaaaaagtttgctgtagaagtagacgagagagtggaagctatactaggagtacttccaggagccaactgtggaggttgtggatttccaggttgtggaggtcttgcaaatgcgatagttgaaggcaatgcaccagttaatggttgccctgtaggtggagcagatgttggtgcaaaagttggagaaataatgggaataagtgctgaagcaggtgagaaacaagtagcaaaagttatttgtaaaggaacttgttcaagtgcaaaagataaatatgagtatgaaggaatatcagattgtagagcagcaaatgttttaaactcaggtgctaagatgtgtaaatttggatgtttaggtcttggaacatgtaaggatgcttgtaaatttgatgctatttctatagttgatggaatagcagtaatagatgaagaaaagtgtgtaaattgtggaaaatgtaaagaagtttgtcctaagggtataataatcacaaaaccagaaagtcaagaagtagttgtagagtgtaatagcaaagagtttggtaaagctgttaaggaaaaatgtactgctggatgtattggctgtggaatgtgtgtaaaagcttgtaaatttgatgcaataatatttgaagacaaaatagctaagatagaccctaataagtgtgtagggtgtatgcaatgtgtagcaaaatgccctacaaaagtaatatcaggtgacataactaagaaaaagaaagttactattgaccaagaactttgtgttggatgtacagtgtgcaaaaaacaatgtaagtttgatgcaatagagggagaattaaaagaaaaacataaggtagatgcagataaatgtgtaggatgccatttatgtatggaaaaatgtccaaagaaagctattaaaattttgtaatatggacaaaataaggatatggaataatttccatatctctaatgagtacataaaacagaggtatggaataatttccatacctctattttatgtatatttattctaatggtaataaatataacaatagtgtaacaaaaaaggttcgacatttctgttgaattttttacaatatagtgatagactaaataggtacaaattacgtacaaatgaggtgaataaatgaatataatcttggcatcagcctctccaagaaggaaagaaattctagagaatacgaatgtaagatttgatataattaaaaatgaaattgatgagattatattggaaggtgaaacaccaaaacatttagttatgagattagcttttgaaaaaagtatgtctgtagcatctgaacataatgaagatgttgttattggagctgatacagttgttgttttagacaatgctattttaggaaaaccaaaagatgagtcttgtgcaagagatatgttaaaaagactatctggaagagagcatcaagtcataacaggtattagcttaataaacttgtgcgaagataaaaaggtaattgactatgtaatcagcaatgtgaaatttaaaacgttatcagagcaggatattgaggattatctgaaaactaatgagtcatttgacaaagcaggagcctatggtatacagggttatggagctttgttagttgaagaaattagaggagattattttaatatagttggtcttccaatttcaaggttaggcgacctattaaaaaaatattttagtataaatcttttttatggagtgtgatttatctgaaaaagtcatttaattcaaccattaaggtaaaagaaatggcaccagaggaaagacccagagaaaagatgcttgccaaaggcgtaaaaagcttatcaaatgctgagttgttggctatacttttaagaactggcaacaagaataaaaatgctattgaattagccaactatataataaatagagatattcagggtattagacatttagaagatatgacaatagaggagctgtgtaatatagatggaattgggttatcaaaatcaacccaaattaaagcagctttagaactaggctctagagtagctagttttaaacctataaagtataaaataaggaatccttgggatatacagaggtattatatggatagcctaaggtatttaaaaaaagaggtttttaaagcagttcttttaaacacaaaaaatgagataatatctgatgtagatgtatctatagggactttaagctcgtcattagtccatccaagagaggtttttaaagaagctataagaagaagtgcaagtaagataatagtgatgcataatcacccctcaggaagtgtagaaccatcaagagaagataaaaatatcacatcaagacttattaaatgtggagaaataattggaatagaaataatagaccatataattattggagatggattatactttagctttaaagaaaatatgataatttgactttatatgtgataaaataataggagaatgttttaaacatgattcttaatagtaggaaggagtaaaatcatggctaaggaaaaaaagaaagaaaaaaaaggtttttttagttttaataagatgacaaaggatatgggaatagatttagggactgcaaatacattagtttacataaaaggacaaggtattgttgttagagaaccatcagttgtcgcaataagagatgatagtaaagaggtattagcagtaggtgaagaagccaaaaaaatgataggtagaacaccaggaaatatagtagctataagacctatgaaagatggagtaatagctgattttgacataactcaatcaatgattagctattttatacaaaaagcggctgataaaaaaggtgttgtaagtccaagaatagctatatgtgttccttttggagttacagaagtagaaaagagagctatagaagaggctgcaagacaagctggagctaaagatgcattccttatagaagagccaatggcagcggctataggggctggattaaaagttgaagaaccagaaggtaatatggtagttgatattggtggaggtacttcagaaatagctgtaatatccttaggaggaatcgttactgctaaatctataagaataggtggagacgaatttgacgagtctatagtggcttatgtaaaaaaagaatataatcttatgataggtgaaagaactgctgaaaatgtaaaaattaacataggttctacatttaaagatgatgaagaaataaatatgcaaataagaggtagagatttaatctcaggattacctaaaacaatagaaatatgctctacagaagttagagaagcattaaaagaacctgtaagttcaatagtagatgcaataaaatctacactagaaagaactccaccagaattagcctcagatataatggaaaacggaataatgctaacaggaggaggcgctttgcttagaggtcttgataagcttattacacaggaaactggtatgtctgtacaaatagcagaaacacctcttgattgtgttgcacttggaacaggtaaatctgttgaagaccaagaaatctttgaaaaagtattaatgatgaatactaagaattagaagttggtgatggccttgagatttgacaagaacaaaaatgagaaaaaaaggattaatgttaaagtgatagcaacgggcgtagttgctatcactttaattggaattgtgggtatatcaattggtaaattttctagtggtagtccagtaaatttaggagtagcttcagatgctattacaagtgtaggtaagggaataaatgatggattttcttttatcaaaaatggttttaaagatgtagcaaattttaaagataattctaaaaaggtaaaaaaattggaagaagaaaatgaaaaacttaaaaaagatatgatagctttaaatgccaaactagataaaacagaatcgctagaagagttaaaaaagacactgaactttgtacaagaagagtataaggcgacaagtatttcagcaagtgttgttggtaaaaatgatggaaactggtatgagagttttgtcataggtgcaggaaaaaattcaggtgtaaaaaaagaaagtatagttatgaatggtagtgggttagttggcatagtttatgaagtttccaacaattatagtaaggcaatttcactattggattctaaggcatctgtaagctttaaactagcaaaggatgccaatgctaaaggtacaattactcaaaatactactttagataataaagatagttataatagtaaaggatatttgcaaggatatatgtttgactcatcatataatgtaattcaaggagatataataacaacatcaggtcttggattcttcccagatggtataccaattggcgaagttgaaaaggtggttgatgataaagataagtcattaaaatatgtagttgtaaaaccttatgttgattttaagaatataaatgacgttgtagtcatagaaccaagaaatataggataaaggggataaaaacaatgaaaaaagttttactttgtctgttggggattgtgcttatgactatagaaaatagtataacaaattatatagatatttttggcataagctttaatttagttcttatatatgtaaccataatctctctttatttagatgaattagaaggtgggattatagcagcaataatagggcttattaaagacataaccgttggtggaatttttggtgtaaatgcattaattttgtttattattgcatatgcaattggatacatgagagatcagctatataaaggtagttatattattactttcgttttaatttttataggcagtttaattgattcaattgtcaatataggtacatctagtataatttatcaaagctacaacatatcaacactttttgtaaaaggtctactagtagcaccaatagtgaatagtttaattggtttagtaatatatcgcttatctaaaagagcagttttaaaacttaaagaagattagttggtgatttcatggaagaaaataaacaagttgatagactaaaaataattaagatagtcatgagcgtgatatttttagctattttagtaaaaataatctatatgactacatttaaatatgaatattacaatgagttagctgagaataaaacatataaaaagttggcaatagaagctccaagaggagaaataaaagatagatatggaagactgttggcaggaaataaaaacttatttactgttcaagtttcaggtaacgatattaataagaaagatgcaaataagcattcaagagcaaatgaaatatcattaaaacttataaatttgctggagagaaatggtgaagaatatgtagatgagtttcctatatatgtagaaaatggaaagtactattatacatatgacagagatattagggaatataaatcagaaaatggtattccaaatgattataatgctaaggaaagtttttattacttagtagacaaacttatatcagctggaatattatctcaagaagataaaagattggatgcgacaagattacaggcaaaactaaatgaaaatggatattatccacctattttagttagtaaatggatgttcacagcagaaagagataagagagattggttggctagttataagataaaagaaactaaactgagtgccaaagaagcgtttgaaaaagtaagaaatagtgatgcattagaaattgataaaagtttgagtgatgaagatgcaagaaaaataatggtcgtaagggatttgataaaatcaaaaggatattctcaatataatccagtaactattgctaaggatgtaggagaaactacgattgctcaaattgaagaaagtgctatggaccttgttggtgtttcaatagcagtagaaccagtaagatattatcctaatgggtcattagcttctcatatgttaggatatgtaggaaaaatgccatccactcaaatagaatcataccttcaaaaaggttatgaaactggagatatggtaggtcttgcaggagtagaaaagagtaatgaaagtagattaagaggaactgatggttataaaatggttaaagttgatgcattgggtagaatcagtaaagaaattgaatctaaaaaacctaaatcaggagatactgtgtatcttacactagataaagatttacaagaagtttcagataatgcattaaaacagataatcgaagttgcttctaaaggaggtacttttaaaagtaaatttggggacaaaccaattagtgcatatgcaggaaaagcacagtcagcagctcttatagctattgatgttaaaaatggagaagtattagcttcatcaagttatcctaattatgacccaaataaatttgcaaaaggtatttctacagaggattataaagcacttcaaccaaaaaatccaaatgacttactagcaggaagtccacttttaaacttggttacacaaggggaatttcagccaggttcttcatttaagatggtaacttcaatggcagcattagaaaatggtttggatccaaactttactataaatgaccctggggttataatgttaggtaaaaaatcttttggtgactatgtatggaaccatggtagaggaaaccatggtatgacaaacttatataaagcgatacaagagtcttgtaatatatatatggcaacaattggtacaggtaaaacatggccagatggaaaaagcattggtatagatatgaatgcaaataaaatacttgagtatgcaaaattatttgggcttgaccaaaatacagggcttcaagatgaagtagaagaaagagcaggtaaagttcctagcacagaagataaattgaaatcaacacaagctcttctaaagtcaaatttagaaagagaaatggcaaatgattttgttgatataactagagaaaaaaatcctaaagaatatgagaaaagaatcaatgagattgtaagctgggcagcagaaaagaaaactcctggtagagtcgaaacaatgaataggctaaagaaaatgaatgttaaagaagatagaatagaagaagtagcagatttagcagtattcagttattttaactttgcaaaatggagtactgcagatacatttaacttagctataggtcaaggtgaaaatgcttatacaccagctcaaatatcaagatatgtagctgctatagcaaatggaggtaatttagtagaattatctgtagttgatagagctgtttcaagtgattattcatcagttaaaattaatgaccagaagaaagtcgaaaaaataccttttaaaaatccagataacttaaaagaattaacaaaaggtatgaaattggttgcaagacaaggtacagcgaagagtgcttttgctgattttccaatagatgtagcagcaaaaactggtacagctgagaaaagtgggaaaatacctacagataacgagtatgaatatttaaaaagtcatatgtcatcttataatgtcaacctaaatgatgcgattaaactagctgataagatgaaagcagaaaaagaaaaagagctttcattagctaaggaaaaggaaataaaaaagaaattagaaaataaagatttgaaagacgaagaaagaaagaaattagaggaagaattagaagatggagtaaaagttagattagaggacactgataaggtgaattcttcatatctaagaaaagctataaaagaattaaatccaaaaataacagatgaccaaatagatagatttaaacaagattatggttcttttacatggactgttgcttttgctccagcagatgacccagaaatagctgttgtatgtgtaattcctcaaggtgattcaagtgtattctcacttttaccaactagagaagttattggaacttatatgggattagagccaactaatagtaaaaatgacaacaagacgaatgatgttaacaattcttctgacgaaaatataaatttcgagtcacaaattaatagatagcttaatctatgtataaactttagctttatatagaaaaaataaaagggtttaaagcgtatttgaagaatataaatgatatatcactctggaggttgttatgtctttaagagaaatttgtagtcaagaactagtagagttcaagggtaataaaagagggataatagtaaatataaaaagagaagctccatttgaggaaatacaggaaaaaataataaacaaattggaagcatatgttggcttttttaatggggctaaaattagtaaaattaatagtgattgtttaactgacatggagattctagaacttaaagaaggaattacttctagatttgatgtggaatttgttgaagatcaaaaaattgaagaaaatagtaattttccaacaaaatatgtcaataccctaagatctggtgaaaatattgaatttgaaggtgatgtagttatattgaatgatatgaaacctggttcaaaagtcctttcaaaatcaaatacagttgttatgggagatataaatgctggtgctaaggttgtagcaggaggtaatgtttttgtaatgggtaaaatagaaggttttgtacatgcaggtgcagaaggcaatgaatttgcatatgttgttgctggaaatcttaatcctaaaatattacaaatagcagataatattgcagaagctccagatgatgaagaaaattatgaaaatgaatcagaaattagcccagaaatagcctttgtaagtaatggaagaattgtaatcgaaagctatttgtcaaagttagacaaatagaaagaaaaatagggggtagtattatgagcgaagttatagttataacatctggtaaaggtggggttggaaaaactactaccgcagcaaacttaggaactgcgctaagcctagaaaataaaaaaacagtagttgtggatgcagatattggacttagaaacttagatgtagtaatgggtcttgaaaatcgaatagtttatgacatagtagatgtagttgaaggaacttgtaggcttaagcaagctctaataaaagacaaaagatttgataatctatatttattaccagcagcacaaactagagataaaaatgctgtctcagttgagcagatgattgatctgtgtgagaaactaaaagaatctttcgagtatataataatagactgtccagcaggtattgagcaaggctttaaaaatgcagtagctggggcagatagagctattgtagttactaatccagaaatatcagcagtaagagatgctgatagaataataggtctattagaagcaaatgaaataaaagagataagattagttataaatagaattagaaatgatatggttaagcgtggagacatgatggataaacaagatataatagaaatattagcaatagatttgttaggtcttgttcctgatgatgaaagcataattatatcaacaaataaaggagagccagctatacttgattctaagtcacttgctggtcaagcatacaaaaatatcgcaaaaaggatactaaatgaagaagttcctctacttgatcttgaagttgaagatggattctttggtagacttaaaaaaatgtttagcatggctaagtagcaaaggaggatacatctgtgttagatttatttagagttttttctaacgaggctaaaactagtaaatctgttgctaaagagaggttaaagctagttttagttcatgatagagtagattgttcaccacaacttttagagatgataaaaacagacattttaaaagtaatagctaattatgcagaaatagaagatgatggtcttgaaataaaaatgtctaaatgcagaggtgagcatgatgacaaacctgtatctgcattagttgctaatataccactaaagaatataaaagatagatgtatgtaattagtgcttaaaagggggatatccttattggtatatgccccttttatttaattatatgtttaaagatagaaagacggtgattctttgaaaaaaatcaatattaattataagtcgacaattaagttgataaaacagttagactggaaacttatagttacagtattagctatctttatttttgggcttgttatacttagtagtgcaacacatgctaattcaacaggttcatataatcaattgattaaacaaggattagcttttgtacttggtataggaatgattatagtcatattattttttgactataatcttctaggcaggtattataaagcgctttatataataagtcttattttgttagccatagttttattacctggaattgggacagtaaaaggtggagctaggtcgtggattaacttaggaccacttgacttgcagacatctgaaatagtcaaattaacatttgtactaagttatgcaaagatacttgaatccaaaaaggataaattaaatacgttaaaggaagttatgcctgttgtagtttattctcttccatttatcggattattgattgcacaaccagacttgggaacaggaattgtattttgttgtatgatatttgcaatgctgttcacagcaggtcttagctcaaagttgataaaaagaggaataatcatactattagtgtcaatgccactgatgtatttaatgatggcagaccatcaaaaggtaagaatagaagcttttctaaatccagaagatgtaactctaaaaggaaactatcaagttatgcaatctctgattgcaattggttctgggggcgtaactggtaaaggactttacaatggaagtcaaaatcaagaagattttttacctgtacaagatagtgattttatatttgctgttgtaggtgaagaacttggtgtaataggaatggcagtgttgataatcttatttatgatattcctattaaggcttttagcaattgcaagagatgcaaaagatttttatggaaccctcatagtggttggtgttatgggaatgtttggttaccagataatccaaaatataggtatgacggttgcgttaataccagtaactggagtaacattaccttttgtaagttatggaggaagttcgttattgacatctttagcaaacttaggattagtactaaatgtgtgtatgagaagaaagaaaataaatttctaaatttaaatacatctaaacataaattgaggagattagatatatgaatatagcattagtagcacatgaccaaatgaaaaacactatggtcggattttgtataggttatgaatcaattttaaaaaagtatggactatatgcaactggaactacaggaaaaagaataatggatgaaactgaattaaatataaatagattagcatctggtcctttaggtggagaccaacaaataggttctttaatagtaacacaagaaatagatttagttatttttttaagagacccattgacatctcaggctcatgaaacagatatacaagcgttaataagactttgtgatgtttatcatgttccaatagctacaaatctagcttcagcagaaatatttataaaagctcttgatagaggagaactatcatggagagaagttagaaaaagcaaaagtcaacgtatttaaaaaatattaatattacagtctaaagaaacagatatataagtgtttaatgccctagtttttctgttgcaataaacctagtacctgtagaaatcttatgaaagatttaaatgatgaggagctaaatttgagattaaataattaggaaatagattatagatagagtagtagaatttaaactattactctattttaataatatgaaatagaattaagtctattattatatatatttaaacttataggtaatactatttcaaccaagtaaatgttgttacgacaacattaataaaacaaaaatttatttttaaaatttgataaatagctgtatattagtatttaatctataaatactaatatacagctatttattatttttaagtctattgtagaatataaaccttgtattatagagtactatgtattattatagtaaatataagtactatacattatagagtagtaggtgaaaaggcggtggtacataatgcagttaaataaagaagtgttaaaaggttatatcgatatattaattgtttctatattagaaaagaaagattgttatggatatgaaattgcaaagcaagtaagagaaagaagtgagtttgaattaaaagaaggaacaatgtatcttgcacttaaaagaatggaatctaaaaatttaattaaatcttattatagcaatgaacaaagttcaggtggaagaagaaaatattataatttaactaatgaaggtaaagattttttagaaataaagaaacaagaatggagatttattaaaaaggttatgaatcaatttttgggagaggtggattaatttatgaaactaatagatgaatatttagataaactatataaaaaatgtgacaataaaagtactatagaattaaaacaggaaatgagatgccatcttatagaatctgcaaatgaatttaaattagaaggattagatgaagaagaagcatgtaaaaaagcaattgaaagatttgatgatggtgatgaaatgcagtatgaattatgtaatataataaaagaactatctttatcattggataggcataaatcaattgtaatggggtttaaaaaagtattaggttacataagtataattgcatttttaatttctggatttatgtggtattacaataatagtttacaacataatatgtataatttaggaaaagaacttgatggagaaataaagcaattggcagaaagacatgatatgacaaatattggtgaatataagttagaacttgaaaaaatacttgataaagataagtatagtaaagtcaaagctcttagactatatgtaatagatatgaaagatggaaacactaatttaagttcttctggattgaatgctaatatggtatatgagagggaagcagattataataacataagtaattttatacagcatttaggatataatggaaaagattttttagacaagaatgggaatatagtaaatccagatattttcttagaatatttcttttattttgaatcggagatgttaattccagtagcatttgcatttggattattatgtataatagcgtattttatattaagatttaaaatttctttaataaaaaataataattaaataattcaccaaataattttaatttgtagagtaaataagatgtttcaaaataaaatttgaatcatcttattttttattgtttgttatactcttttcttttatatttctccatagtggattgtatctatacataatcacatattttgatataattataccttccaaaaaatgtattgaatatacaaattataatctgtataatgttgttaggggagaatgtatgaagtgtatacaattttaattttaaatgtattattgacaattctcctcactctcgtcattaccaataattagaaaattgacaaacctgttacagaccaacatttttgaatatattaattattatcattttattgtgatgatatcaaaaatgcaggtttgtgagttggattgtgtacgaactatataggaaatatagaacagattttccaagaaatctaaatattctatgaccacgtgaattgctatgcacacatgttgataatccatattttaaatctaaaatgaacttaattaatggtagggaattgaaagtaaaatatattataaaggagaatgctaatatgaaaaaaatcaggaaattagctactaaactattgattgcaacgatggttttaacctcatgtatgagtgtaacagtttatggtatgacagctaaagatgttactgcaaagacaccgaaaagctatgtagctggaaccaacagtatatatggtccaaagttatcacaagctcaacttaattcggtagcacaagcaacagcagactttatgaacaagaaaattacaaagaacatgaccacagatgctaagattagggttgcttataatcacattaaaaacaacacaacatatgttaactggaacgcagcagagggagccaatactgcttatacattggttactaaaaaaggtgcttgttctggaatgtgtaggagcttgaaagctttatgtgatgctatgggaattgaatgttattatgtacatagtacaacaaatgaccatcagtggaatcttattcgttttgaggatggacgtttgtatcatgtagatattgatgccaacaaatcagcaggagcagacatcatatacaagagtcttactcacccattaccatttgacaagaaagcctatccagctgttggtgaatcagtaaagacacagaatccaacgccaactgttaagaaacctacgccagctaagccttctgcgccagttggacctgggaatcacactatgatagcagatcaagaagaagcaatacttgatgaagtttatggaaataatctacgtcccaaaattgaaaggtatgagggagttccgtgtagtttaatcaactcatcaataaatacaattaagtttacaagcaaaaattcaaatttagacccatcaaggcatacagtttctgtaatagggtttatgaatacaccatatggtatggttgcattagctccagatggtgtacctgttgagtatccttttgaatatgataagccattttctttagattttactggtaaaaacctttctgcagcagaattatcaaaaaagtgtaaaaacaataatgtaattattaaaatagaaattggtgaaatagaacctaattctggaagagggcaagtaagatatgctagatatgtgaattaatataaatatacaagtatacaaatagaaaagattataaataatgtaccctcttggtgagggtgcatttatcattatattagtcattttgggaaataaaaaaggagttgaacttaaaattagattagaaaaattaattttgagacaactccattttaatttatttttaaatataaaatcatttattttaaataatattatgtgtgattaatggctatttaactaattttgcaaattctgcaccaaatgccatacactcttttaatgtctcttcactagggaagaattttttcttaagagattctacaggcattttgaatgacatagatttaagtaaagtctcagccatagttataccttcaccactccaaccaaatgaaccaaatactcctgctatcttgccttggttagccattgggtctataacagagaataaatcccacataggtttaaccatagttttgtttatagttggagaacctagtaatattacttttgacactactaatgtatcgtgcatttctgttaatgtcatatcttctaaatcatataattcagcctttgcaccttctttatcaagtccttcttttatctttttagccatctctaaagtattactataagctgataagtagaatatagaaacttgattttgattagttgtattaacagcttctgtagaccactcaacatatcttttaacagcagccattgggtctttagtaagcattggaccatgagaagtcaatatagtatcaaattctatgtttagtcctaccaccttatctacagcacttaaaacatgtttagcaaatggcttaactatacaatcatagtagtgtttagctgattttagataatcttcactattcactacctctgcatcaacacttgcaaagtgacaaccaaatgcatcacaagttaaaagagtcttgtcctcctcaatgtaagtaaacattgtatcaacccaatgtaagaatggagcagttataaatctaagatttcttttaccgatatttaaaatttcaccatcttttattacatgacagttaaaaggtctatttatttgaccatctaagtatagtttagcagctttagtacaataaacttctatattaggatttatatctaataagtattttaaactacctgcatggtctggttctgtgtgatgaattacaacatagtcaattttagctatatcagtaacctctgataaattacttaaaaactcatctttaaaatttgcctttacagtgtcaaataaaaccgttttttcgtccttgattaaataagagttgtaagttgtcccaaactcagtttccattattatgtcgaatacttttaaaccttcatctactacgccagtaaagtagatatctttttttacttcaaaaactttactcatttttaaccctcctaaaatttatcattatataagtaacatacccaattttgaggtgaatgaaacaaaagatgtcatgataagtcatgtaaaacaatagttttatgtttataatatatcatactttgtaaaaaaattgtatttcaataaaaatttaatagaaaatattcttaaatatttttagctattctattttgtgaataatatgtattttaaattcaatattttagttatatttttgatagaaaatattttatcgtgtataatactacttataaataagaataaaaataaagagcttgtttggaggaattttaataaatgaataaagtagacttgaaaaaaatcttaaaaaaagtagaaaagcctgctagatatcttggaaatgaaataaattcaattcataaagatactagtaatagtgaattgataagatatgcacattgctttccagatttatatgaagttggtatgagtcacttagggagtcatatattatatgatgtaataaataaggatgaagatgtattttgtgagagagtgtattctcctgcagttgatatggaaaatataatgagagaaaaaagtataccattatttgcattagagtcaagagagcctataacaaactttgattttgtcacttttacacttcaatatgaactttcatacactaatatcttaaatatattagatttagccaatataccaatattaaaagaagaaagaactttggaagacccatttataatggttggtggtccttgtgcttataattccgaaccattagcagattttatagatgtagtaatattaggtgaaggtgaagaggttaatttagaagtagtaaatgagtataaagaatggaagaaaaataaaacgactagagaagattttttatataaaatatctagcatagaaggagtatacataccaagtttttatgatgtcaagtacaatgaagatggtacagttcaaagtgtaactcctaatagagaagggattactaaaaatcctactaaaaggataataaaagatgttgagactgtagattatccagaaaaactaatagtaccttatatagatactgttcatgatagaatagtactagaattatttagaggatgtactagaggatgtagattctgtcaagcaggtatgatatacaggccaataagagaaaagagtgttaaaagacttaaagaaatattagataaattagttaagaatactggatatgatgaaatatcattatcatcacttagtacgagtgattatagtaagttatcagagttgactgattatttggtagatgaatatgcatctaataatattgggatttcgcttccatcccttagattagataatttttcaatggaaattgctgataaaatacaacaagtaagaaaatctggacttacttttgctccagaagcaggaactcaaagacttagagatgttataaataaaggtgttacagaagaagatttggaaaatgcaacagaaagagcttttgagatggggtggaatagtgttaagttgtattttatgattggtttaccaactgagacttatgaagatttagatggtatagctaaattagcttataaagttattgatatttatagaaaagtaaatggaggaaagctaaagagaagttttagtgttacagtgagtacttctacatttgtaccaaagccatttacacctttccaatggcatggtcaagatactacagaagaagttattaataagcagagacatttagtaaataaattaagaaataacaatataaaatacaattatcatgattcaaagactagtttgatggaagcagtagtagctagaggcgatagaagaataggaaaagttatatatgatgcatttagactaggtgctaaatttgatggatgggcagaacattttaatttagatatatggaaagaagctatggaaaagaataatctttctatagatttttatgcacatagaaatagaaactatgaagaggtatttccttgggaccatatagatgtaggtattagtaaaaaattcttaattagagaagacgaaaatgctaaaaaagaaaaaatcacttctgattgtagacataactgcaatggttgtggaataaatatacatgatataggaagggggctttgctaatatgagtaagataataagagtaaaatttaaaaaggaaggcgacatgatatatatatcacatcttgaccttcagagattgttacaaagagcgtttagaagagctgaaataaacttatcacattctcaaggatttaatcctcaccctaaaatgagttatggcaatgctttggctttagggacagaaagtcaaggtgagtatgtagatattgaaatagaagaagatgatttatcagtagaggaatttttaaataaagtatcaattcaacttccagatgggatagattttatcaaagcaaaagaaattgatagacaaacaccttctctttcttctgtgatagactatggagaatatttgtttaatatagatttgaaaagacctatgacgaaagagtttgtaaaaagaaaagtaattgactttatgaataataaagaaataatcataacaaaaaagaataaaaaaggtaagatggttgaagtagatataagacctatgataagaacctttgatgttttaaatttagaagatgaacatattactcttactgctactatagctacaggctcaaaaactaatttaaatactaatatacttataccaaagatattagagatgtttgaacttgatattgacccattagatgttgatatattgagaagagatttatatgtattagaagatggggaattagtgactcctatgtaagctcgagaggtgaagttgtgaaaaagatagttattgagtccctaatagggtcccagaaaacagcagtacttgaagatgaaagattaacagaactttttgttgaagacaatttaaataagaagactgtatccaatatatatcgtggaatcgtaaaaaaagttataccaggaatagaagcttgttttgtagatattggatttaagaaacttgcttatttacaattaaaaaagggaagtactataaaatctggtcaggatattttggttcagataaataaagaagaaataggaactaaaggcgcaaaattaaacactgagattagtatttctggaaggtatattgtctatataccttccaatgatagaactacaatatcaaataaaattactgatgaaaaagaacgatttagattaaaaaaaattactaaggcagtaaataaggaaaatctaggattaataataaggactgaggctcaaggttgcactcatgatgaaataaagaaagatatagaagagttgaaattaaagtatgaaaatattttaaaagaatataaacttggtataggtccgaaattattatataagtctttagattttgcaactaaatatgtaaaagataatgtgaatgatgatattgaatctataattaccaatagttatgataagtactctgaacttaagtctattttaagaggtatagataagacttatgttgataaactgtgtcttgaggaaaatagagatgtatttgatttatacagaatagaatctaaaatagaaaaattattaaataaaaaagtatggttaaagagtggaggttatttaataattgaaaaaacagaagctcttacggttatagatgtaaatacgggtaagtttattggaactggtaaacttgatgaaaccgtttataaaactaatcttgaagctgcaaaagaaattgtaagacagcttataattagagacatagctgggataataataatcgattttattgatatgcataaaaagaagcatcaaaaggagattttacacatcctagaagaagaatttaataaagataaaagaaaagctgaagtattaggtatgacaaaacttggtttagtagaagttgctaggcgtagagaaaaagaatccattgataagtattatttaatgtcttgtccatgttgtgatggtgaacaaacaataaaatctgtacattatatactagatagtattgaaaaagaaattatgagaataagtgaacatactgtttacaaaaacataatggtagaatttaatgattttatttttgaacaaataaaagaatattatatggatataattgataaaattggtgaaaaatataatataaagatttctttaaacgcaaatagtacattaaagcacaataaaaccaatgttattttcgataaaatagttgacaataaaatgtaaatattttataattaataattgtaatgccgcacagtaaaggtttaaatcttcaaatgaagtaccttgtactggcgagtttgaggccgaggaggtgtatttaatgtacgctatagtaaagactggtggaaagcaatataaagtttctgaaggtgatgtattattcgttgaaaaattagaagctaacgcaggtgatgttgttactttaaacgaagtattagcttgctctaaagatggagaattaaaattaggttctccagtagtagaaggagcatctgttcaagctaaagttgttgaacaaggtaaagctaagaaagttatagttttcaagtataaagcaaaaaaagattacagaagaaaacaaggacatcgtcaatcatacactaagatagttgtagaaaaaataaacgcttagttattggttaagttatgataaaagttaaatattattataatgatgatttcttgttgcaaggtttttgtttaaagggacatgctgattttgctgaaataggctatgatatagtatgtgctgcagttacatctaatgctattgcagttataaattctttagacaaattacaaaagattgaatttgaaaaagtagtaggagaagaaggtcatatagagtgtatagtcaaagatacgcatgtaaaagacgcacaattattactaaatcactttcaattagcggttaaagaaattaaacgggaatacccaaaaaatataaaaattttaaaaaagtagggggtgactccatatgttaaacatgaatttacaattattagcatctaaaaaaggggtaggttcttctaaaaatggtagagattctatatctaaaagattaggtgttaagagattcgatggtcaattagtaactgctggaagtataatagttagacaaagaggaactaaaatacatccaggaactaatgttggaaaaggtagtgatgatactttatttgcattagttgatggtactgttaaattcgaaagaaaagacaagaagagaaaaaaagttagtatatatccagtagcaatagctgagtaatatacataaaaggagtgttgaggcactcctttttcttataatactgatgaatttataatggtatttttggtaatgctaattaaaagtttttaattaagtaggtgaagaatttgtttatagataaggcaagaatatttgttaaggctggaaatggtggaaatggttcggtagcatttagaagagaaaaatacgttccagctggtggtccagacggtggagatggtggtcgtggagcaagcatcatatttgaagttgatttggggcttagaactctaatggactttaagtaccagaaaaaatatcaagctcaaaatggtggcgacggaagcaaaggaaaaagagctggtaaaaatggagaaaatttagtattaaaagtaccagcaggtacagtaataagagatgaggctacaggtcttgtattagcagatttaaaaaaagaaggagatacagctatagttgcaaaaggtggtataggtggtaaaggtaaccaacactttgcaaatgcagtaagacaagctccagcttttgcaaaatctggtacagatggagaagaaagatggataactcttgaacttaaaatgatagcagatgttggtcttttaggatttccaaatgtaggtaaatcaacatttctatcagttgtaactaaagctaaacccaaaattgcaaactatcattttacaacacttacaccaaatctaggtgttgttcaaactaagtttggagatagttttgtacttgcagatatacctggaattatagagggtgcttctgaaggcataggattaggtcatgagttcttaagacatgttgagagaacaaaggtattgatacatattgtagatatatctggattagagggaagagaccctattgaagattttgacaagataaatgatgagcttaaattgtacaatgaaaagctttcaaagaggccacaagttgtagttgcaaataaatttgatatattagaagatgagagtaagtttgagaagtttaagagtgaattagaaggcagaggatatacagtatttaaaatgtcagcagcaactcgtcaaggcatagatgaagtaatagcctatgtttctaaaatgctaaaagaagtagaagatgtggagctagtttcagaagaagaaatgtatagaccagaacttgatattggtactgaagaagagttaagtatagatattgaagatggtgtgtatgtagttacaggtaaagcacttagaagaataatgtattctgtaaattttgatgatatggaatcccttcaatatttccaaaaagctatggagagtcaaggtgtttttgataggcttagagaaatgggaatagaagatggagatgtggttaaaatttatgaattagaatttgagttttacaattaatttaaatatagattatagataatttaagtatagaattatagaggtgagaatatgttaaaaggaaaacaaagggcgtatttaagatctttagcaaatactttaaagcctactacacaaattggtaaagaaggtgttacagagagtttcttagagcaattagatggtatgttaagaactagagaattagtaaaagttactatattagaaaatgcaggtcttgatactaaagaaactgctaatgcagtatgtgaagctttaagagctgaatttgtgcaggctattggttttaaatttactatttacaagaggaatattgaagagcctaaaatactttttccaggacatgaacaggcgaaagcaaagactaaaaataataatgttacaaaaaagggtaaaccaactaaaagagctgttagataatagtttatatccttttagggaaataagttaaaaaaatagtgacaattggaagaaattgtattatactattaaacataaattttaattagcaatcttatcaagagtggcagagggactggccctgtgaagcccggcaaccagtatatttaattatacattggtgctaaatcctgcagcatttatgctgaaagatgagtataaacccgtcatatggcttgagtttatactcaagctttttttattggtatatttatatatataaataatttaatataatcaaaatgatgggggtatgttacagtgaagatagcaatattagggtatggaacagtaggaagtggattaattgatttaatagaaaataatacttcaaaaagagatatagaagttgttggaattttagttaaaaataaagaaaaacacaagtataagaagtattttgataagataactactgatatagaagatatatttgacaaggatattgatatactagttgaagtaattggaggattaaatccagcttttgattatgtaacaagagcgttaaataaaaaaatacatgtagtgacagctaataaagatttactggctgaaaaaggtagtgaccttatagaattagctaacttaaataatgttagcatcaagtttgaagcatctgtggcaggtggtattccagttttaaaaccattgatagaatcactggaaggcaacaatataaagagcataaacgctattttaaatgggacttgtaattttatattatcaaagatgtatgatgaaaatttaccatatgatgttgctttaaaacaggcacaagagttgggatttgcagaagttaatccagatgcagatgttttaggatatgatagtgctagaaagttatctatattgtctactttatcttatggaaaaatagtatattggaaagatttattattagaaggaataacttcaatagatgaaaaagatatagaatatgcaaaaaaattaaattgtaagataaaattggttgctagaagtaagtatgaatcaggagaagtaagtggatttgttagaccagcattagtggacaataataatatgctttcaaagatagataatgagttcaacgtagttattttagtaggtgattcagtaggtgaactttcttttgtaggtaagggagctggaagaggtgcaacaggaagtgctgtttatgcagatattatagatataatagataatagaagttcaaatataaagtctttttcaaaagggaaattggatttaagtggacttatagaagatgagtgtagtgcagtagttagatttggtgggtataataataaagatggaattttagaatgtttagataaatatgtagatagttatgatattatagatgatgaagaattggcgatttttgtaagtgcaaagtcagaacatgagattgatagagttttggaaattgtaaaaagaaataattacagtgaatcagctaaaaaattattgaagatagattaatatgtttatgcaagaattatgaaaatttaatagggtgtctcaaaatagagagacaagccttttttccagtattgaaataataaaaatatatttgattttataaaaaaagagtgtctcatgaactaaaaagttcattttgagacactcttttttaatatctggtgaattaataagataatagaaaaatgtatacgttataattaaccaataaagaaattttcactagcttcattaatagcttgctgagttactcttatatatcgctgtgtagtggctacagaactgtgatttaaaagttctttaaccaactctaaattattgttactcttttcaaattgagtagtagcatagagctttctaaagctatgtgtacttatattatacagatttaagtgtttacaaattatcctcaactgtttttgaatagcctttgtctttatatttactaagtagtcatttgatttaagattatactttcttgcatgttcatttatggactcaattatatttttattaactggtctatactgtaatttgcccgtctttttttcatttatttccaacatattacctttaaaattacctatctttaatcttaaaatatctgatattcttagacctaaattagcttctaacattagtgccaatgcaactttaggattttttctaaatcttttttcaacgccattttcactataagtaaagccagtatgtaatagttccattatctttttatattcgtctatttctataggtcttgttgccattttcaaccactcctcttagtttgatttggtaagtttaggtcggtatttattatataatataaatgaaacattatataatggaaaaatttcccagtaaacttatacaagtgtgatatatgtgattaaggagaattttttgaaaaatatttctaataaaattattaaattgtgatgaaataactatgctgttaaactaattaaaaaggttattaaaattatgacaaatataataaaaaaatggaagtatttagttaagttttattagttttatttttttcgtgaaaatttcttaataaaaaaagtatttttatatcgcattagtttcccatttgtagataaagttttcatatgtttttttgcaataaatactgctgagattagataaattattactacaatttgaagaattgtatcataatagctaagataataaaaccagattaaattattatatataacgttgtatgtatcagcaaagctagaaaccaacacagcagagtttgcaattggataaagtataaatataaagatagcagctaaaactccatgcgcaaatttacttagtatgtataattttaaatctatgtccgtttttgatagaaatgtacaacattgagctaggatggataatccactaaatcctatcaaaaagctagctaaagatgctcttaaaatttctggagaacttgttatactagatactttattgcatcctatagtaatttcaaatagaccacttacaaatgcttgacagagttctttactaacacctaaaaatgaaagaggcaaatatataactgatgctattaatgagattacattaaaaagagatagtattttaaatactactgaaaaaacaattacaaatccaccaactgtaagtaatgtatttactccattaaatacagcatttccaaataaaacaaaaaaaccattcccacttgaatttctaatgttgattacattttttatatttgtttttaaatccaattttgtctttggaagattttcattaccataatttctaaagaaaagaccaaccaatatagttcctagataatggcagagaatcattaaataacctaagtttgaattttggaacatacctgtaccaaccgaacctattatgaataaaggtcctgatgtagaacaaaaagacacaagtctttgtgcttcatgcttagaaatttgcccattactcctaaattcagaagctaaacttactcctactggataaccagatactgtagatatagcaaaagctaaagcgctctttcctgaaacattaaatacaaatctagttatgggattgatgataaaccctataatatccactatttttaaatcaacaattaagtttgctccaattataaatggtagtagtgatggaactaaaacattagaccatatagagaagccttctcttgcagattttatagcttcatttgggtataggataatccctaaaactagaactccaactataatagctggagcaaaaaaagcaataattttattttttttcataatatcacctgtaaatttgagttataagatattatattaaaagtaataaaaatatatgaatgtaatggtttaagatatataatagatatatattacaacaacgattatcatattggaggaaaaaatgtttaatagtatagctagtaaaaaagtttatgaacaagtaattgagcaaatacaatataaaatactaaatggagagttaaaaaagggggataaattactatcagaaagagaattgtctgaacaaatgaatgtgagtagaacttccataagggaagctattagggtattagagactatgggagtgatagaaagcagacagggtgaaggaaattttatatgtacaaatatagaaaaaactttaatagaacctttatctatgatttttaaacttaataatggcacacttgaagatatattagagcttagaataatcctagaaattgagattgcaaaacttgcttcaaagagaataacttcttctgaagttatagaattgaaacatataatagatgaaatgagagtagaaactaataaaaaagataataatcgagtactggtgttattagaccaaaaatttcacagtaaactagcaacattaagtaaaaattatttaattcaaagtctttttatgacagcatcaaaattatttgatggatttatagaagatgcaagagaaaaaataatcgcagaaccttttaatgaaaatatattgcttaaacagcatgaagctatatacaatgcagttgtagaaaatgatgtagaacttgcatgtgagaaagcaaaggaacatatggattttataagtaaaaattatagaaaaaatgaaaattaaaagtttgttataaaataaattattcttgcaaatggtagataatggtactatcatataaatgtgaaactggtatgaccacataccaattttatagtttattataatgggagattaaaaatggtaaagttaaaagtaccgtattcaaaacaaggaatgattttagaaatacctgatgaacgttttctcggtgttttggagtcaaaatcggataattatatagaacataagactcaagaagagatagttgaagaatctatgaataatcctataggctctaattctctggaagaactggttaaggggaaaaagaatgtagtcataattacaagtgaccatacaagacctgtaccaagtagaataactatgccaattatattaagaaggattaggaatgttaatccagaaattgatgtgaagattatagtggcaactggatttcataggccaagtacaagggaagagctaatttataaaatgggagaagaaatagtagataatgaagatatagttatgcatatatctactgatgataaatctatgtgtaaagtagggatattgccttcaggtggagatttatatataaacaaactagcatatgaggcagaacttttgatagcagaaggttttatagaacctcatttctttgcaggtttttcaggtggcagaaaaagcgtacttccaggaatcgcatctgcaaagactataatgtacaatcactgtagtgactttatagatagtgataattcaagaactgggaaattgaataataatcctattcatgaggatatggtatatgcagctaaagttgcaaagttagcattcatattgaatgttgtaatagataaagataaaaaaataattgcttcctttgctggtgatgtcgaaaaagcacatactaaaggatgtagatttgtaacagagttatcaaaagtaaattctataaaatctgatattgttgtaactacaaatggtggatatccactagaccaaaatatttatcaatctgttaaaggaatgacagcagctgaagctacttgtaaagacggtggagtaataataatgatttcagcatgtaatgatggtcatggaggtcaatctttttatgaaaatgtagcaaatgcagattctccaaaacaacttttagataaaattagaagtgtcgatagagtagatacgattccagaccaatgggaatttcagatactagcgagaatattatctaaatatactgtgataatggtaacagataagtgtaatcctgaaatgataaaaaaaatgcatatgaaacatgcatttaactttaaagaagctttagaaatggcgaatagtatagttggtaaggagagcaaagtagtagttatacctgatggagtatcagttatagttaaataaaaaaggagtgtactttatggaaattttgacatgtattaaacaagttcctggaacgacttcagtagaagttgatgaaactacaggagtactaaaaagagatggagtagattcaaaaatgaatccctatgacctatatgctttagaaacagctcttagaataaaggaagataagaaagcgaatctaaaagtacttagcatgggtcctcctcaggcaaagaaggtaattgaagaaagttttatgatgggagctgatgaaggagcattaataagtgataggagatttggaggagcagatgtattggctacttcctataccatatcacaaggtattaagaagatgggaaaggtagacctaataatttgtggaaaacaaactactgatggtgatacagcacaggtgggacctgaagtagctgaatttttagatatacctcatgttactaacgttacaaaattaattgaagttaaagatgaaagtatagttgttgaaatagatatgccaaatgatttacaagtatgtgagattgaatatccatgtttaataactgtagaaaaagacatttttcaaccaagactaccttcatttaaattaaaacttaatactaaagatagagaaatacctgtatatagcttagatgactttgaagataaagatgaaaataactatggacttaacggttctcctactcaagttgtaagaatatttcctccaaagccaaatacagataaaaatattgtaagaggaaatgcagatgaactaagttttgcacttgtaaataaattagaggaattaaagttggtgtaagggggagtaataaatgtcaaagatagttgtaaatcaagataaaataactgacttaaagagaattttagaaatatgtccttttggggctatagaagaaaagtcaggtatagtagaaataagtgctggctgtaagatgtgcaagttgtgtgtcaaaagtggaccaaaaggcgcatttgaatttatagagagtagtaaagtacaaattaataaagatgaatggaggggaattgcagtatatgttgaacatcataatggaaatatacatcctgtaacgtacgagcttataggtaaagctcgtgagatggcatcaaaaataaaacaacctgtgtattgtgtatttgtaggaaaagacataaaagataagtgcagtaatttgatttcttatggggtggatgaagtatttgtatatgatgaagatgaatttaaagattttaggatagaaccatattcaaaagcaatagaaaactttatagataaaataaaaccaacgatagtattagttggtggaactacattaggtaggtcattagctccaagacttgccgctagatttagaacaggtcttacagcagattgtacaatacttgatattcaatcaaatactgatttagaccaaataagaccagcatttggtggaaatataatggctcatataaacacacctaataatagaccacaatttgccactgtaagatataaaatattttcagcaccagaaaaaatagagaatactacaggaaagataactttatgtaaagtagaaaaaaaagaactaaaatctaaaattaaggtactgagtgtaaaagaaaaaaataaagaagttggtctggaagaagctgaagtgatagttgtggcaagcagagcaataaaaaaacaagaagatatggagatgatatataaattagctgataagctaaacgctcaagtggcaggaacaagacctgtaatagaagcaggttggatagatgctaaaaaacaaataggtcttagtggtagaactgtaaaacctaaattgataataacttgtggtgtatctggagcagttcaatttgttgcagggatgcagggtgctgactatatagtagcaataaataaagatgataaagcgcctatacttgatgtagcacatttagctttaataggtgatatttatgatattattcctaaattgattgaaaaaatagaaaataacaaagataataatcaaaaatatatggcatcagcagctaaatagggggatagaaatgtataaattaatcgataaaaaagatatagattttttaatagatacttgtggagaagaaaatgtattagttggaagtgatataaatgaagatttttcacatgatgaacttggagggattgagaagtaccctgaagttttagtaaatgtacttgaaactgaacaagtatctaaaataatgaaatacgcatataaaaataatataccagtcacaccaagaggtcaaggtactggtcttgtaggtgctgctgttgccataaatggtggaataatgattaatctatgtaaaatgaataaaatacttgaagttgattatgaaaatttaacattgacagtagaaccaggtgttttattgatgacaataggtcaatatgttcaagatagagatttattttacccacctgacccaggtgaaaaaagtgctacaattgcaggtaatataaacactaatgcaggtggtatgagagcagtaaaatatggcgttacaagggattatgtaagaggacttgaagttgtactaccaaatggagaaattataaatgtaggtggaaaggtggttaaaaatagttctggatatagtataaaggatttattagtaggttcagaaggtactttaggaatagttactaaagctatattaaaattgcttcctttaccaaagaaaagtataagtttgcttataccatttccagatttatcaatggcaatagaaactgttcctaaaataataaaatcaaaatcaataccaacggctatagaatttatggaaagagatgtaatattggcagcagaagaatttttaggtaaaaagtttccagataatacatcagatgcttatcttttacttacatttgatggaaatagcactgaagatatagaaaaggaatatgaaaaagtagctaatttatgtttagaaaatggtgcattagatgtatttatatcagatacacaagaaagaaacgattctatatggtcagccagaggtgcatttttagaagctataaaggcatctacgacacaaatggatgaatgtgatgtcgttgttccaagagataagatagcagagtttataagatacactcacgagcttcaagacaaattaaaaataagaataaaaagttttggtcatgcaggagatggaaatctacacatatatattttaaaagatggtatggatgataatacatggaaaataagattaaaagaaacttttgactatatgtataaaaaatctagagaacttagtggtcaagtttctggtgaacatggcataggatatgctaaaaaagagtacttacatgaatcaaattcagatgcttatatgatgttaattaaaaatataaagttagcttttgaccctaaaaatattttaaatccagggaaaatatattagaaatattaatttaataatatttacaaaacaaaaaatattaaattagatttaaatataatattttaaactttacttttaaatctgaagctaaattgtaaaatttttaggatggcaatatttacttaaatttagaaagtaacataatatttaagttgatgttgtcatcctaaaagcatgtgtacataaataaagtaagactattgtatcttatataataaagagttaataaaatgatttttataaatatagttattttaaaaaactactttacatatattggatgagtataaaaatccatagggccttttactaaatctttattgtttttataatatattgaattatatatatttgtagcttttatatcataacttatgagtgttttaaaaatcgtatcatctaatgaaaatgatatatttgaaaacttgtttattatttttatttcagatttattttttatctcttttagaatttctctacctttatcattaaaagcaagtattcttatataaggtatagtatctatgttttttataagttgcatgtcgctttttttaatacctaacaatatattgtttagagttcgtttgattttggttaaagtgtatcgcttggatttaattgctaattgtagctcatgtagaaattcagatgtaaagatatctttatagattctgttttctatgccttcatttacttcaaaatactcttttaaagtgtccatatctctaagtataattgtttttaaaatatcaaagaagaagtcatcaaacataggtaaaaaaccattatctactttttcatttaggatgttataagttttttctggaataacattttttaaatgaaaaaggtctgtattttctttaagtgaagtccttatagcagtagcagaacaaatatcactctcaatttcttcggaattatattctgattggaccctggagatagtaaatggttttatactactgtttaaatggatgaggttttttatgtattctatacccagtatgttgtttgatgaatttaatgtttttgataattgttcctttgaataattttgtataaaattattttttttgtcttgatgtatataatcaaaaagtgcattagctctagctgttggaaataacaggccatcatctaaatatttttttaaaagtaacttaaattcatttggttcatttgctaaaatttcagctatattataaagaatttctgtatttccttcttcactaccaaaacatatagaatttatgcagtttagtgaatttaaaattgttatagcaccatgagaaaaaatttcagcactttgacaagcaaataaagttggtaattctataactaagtctacaccattttcgacagcaatttttgctctagtatatttatcaaataaagctggttcgcctctttgtagaaaatttccactcattattgctacagtatgtgttgcatttgttttttctatagatttagataaatgatatatgtgtccattatgaaatgggttatattcaactattaatccaagtatgttcataaaatactccttttatctttaattattttatatatatcacaatttattataatatgtataaaatttaaatttttaattataaaattaaaaaacgtaaaaaaatttataaaaatgtagaaatgttacctacataaaaaactggttaaatgttattaaaataactttattagctctttatattatattattataacaaatgggaaagaataatctacattaagttaacttgttaatatattattagtgaaatacacaatttaccatactagaaatatgatataatataaaaaaaaagtatatacttttatattaaaaggtgatatattatttatgaaaatcgtttaatgtatacaataatatatctataacaaaataataaaagatagagttttatttagacatttattacaaatcaaaatttattacatattatttataaaaaaatctaaggaggaaataataatgaaaatattagtattaaactgtgggagttcttcattaaaatatcaattaatagatatgaataatgaagaagttttatgtataggattggttgaaagaataggaatagaaggttctatattaaaacatgaaaaagcaggtagagatgataaatacgttgttgaacaaccaatgaaggaccacaaagatgcaatagcattagttttagaagctgttgctcatccagaatttggtgcagttaaagaaatgaaagaaatagatgcagtaggacatagagttgtacatgctggagaaaaatttgcaacttcagtagtaataactccagaagtagaagaagctttaaaagaatgtatagatttagctccacttcataatccagcaaacataatgggaatagatgcttgtaaagctatacttccagatgtaccaatggtaggtgtatttgatactgctttccatcaaacaatgcctaaatcttcatacttatatggtttacctcatgagctatatactaaatatggggtaagaagatatggattccacggaacttctcataattatgtatctcagagagcagcagagatattaggaaaagatataaaagatttaaaaatagtaacttgtcacttaggaaatggtgcttctatagctgctgttgatggtggaaaatgtgtagatacatctatgggattcactccattagaaggattaataatgggaactagatgtggagatatagacccagctatattaccattcttaatgagaaaagaaggtttagatgctgatggattggataaattaatgaataaagaatctggagtatatggaatgactggaatttctagtgacttcagagatatagaagatgcagctaaaaatggagacgaaagagctcaggctacattagaagcgtatgttaaaaaagtacaaaaatatataggcgcttatgctgctgaaatgaatggattggatgttgtagtatttactgcaggcgttggtgaaaatggaaaggctataagagcagatattgcttctaacatggagtttttaggaatgaaattagataaagaagctaatgatgttagaggaaaagaaacagtaatatctactgctgattctaaagtaaaaatgcttttaataccaactaatgaagaattaatgatagctagagatacattaagattggtaaaataattaaattaaacctatgcctatcaagtaaaaatacttgacaaacaaatgctagatttgtataataaatttggtgatatgttgaggtgaacttaatgaaagttagcatagaaaaaataaatagaaaagaaactgacaaaatagacttgaatttttgtgaaaaaattgatactattagttattgtgatgagatttacaaattagtatcacctgtaaatttaaaagggaaagtgtcaaagactaataaaggtttgtatctagatatagatgtcaattttacaattgttgacaattgttcaagatgtcttaaagaagtagaaataccactagagtattctatacaaggttttttagtaaaagaagaagattatgatgaagatgagtttgaggaatttgatccttttatattcgatggtgaagaaatcgaccttattgatataatagaacagacattagattttaatgtacctcataaagttctttgtagtgaaaactgtaaaggtctttgtcaagtatgcggggcaaacttaaatgaagaagagtgttcttgcagtgaaattacaaacgatgaggaatacatagatcctcgttttgctaaattaaaagatttatttaattaaattttgactaaggaggtggcgtaaatggcagtaccaaagcgtaaaacgtctaaatcaaacacaaaaatgagaagagcagctaactcaaagatggaagcaacaggatttgtaagttgcccacaatgtcatgagccaaaattaccacatagagtgtgtccagactgtggatattataaaggtaaagaagttgtgtctaagtaatagcttctaaaaagcatgtagagtatactctacatgttttttttgtacatataaaaaaataagatgatttactagagaaaataagtggattttatgcatattaaaaaatagaaaaataataatataagtattgaaaatttttgtgtgttactatatactactattagtagctggtactaattacagctataaaatttggagggaacatgaaaaagaaaagtaaagcccaaagacaaaaagagcttatagatatgctaaagacagatcctttttatactgatgaagaattatcaagtctgtttgatgtaagtatacagaccataagattagatagaatgagtctaaacataccagagctaagagaaagagtcaaatcaatagcagaaactcagagttcaaaagtaaagactttaggagtaaaggaaattacaggagaaatcattgatttatctgtagggcgattaggtatatctatgttagaagttacacaggacatgatttactctaagactaatactttaaaagatacgtatattttttctctagcagattcattggcaatggctataatagatgcacctaaggttattatgagagttgcaaatgtaaaaagttttaagttgatagaacaacaagatagacttatagcaaaagcagaagtgtatagaaatatagataaaaagcattatgtaaaagttgttatcaacaataaagcccaagagcaaatatttagaggaaagtttatctttgaagaattagattaggagggaaattatgaaaatagtaattgatggaatgggtggagataatgcacctaaatctaatgtagaaggcgcagtaaatgctataaaagaatatcaggttgatttaataatcacaggagataaagatttacttgaaaaggaattttcaaattatgaatttgatagaaataaattagagatagttcatactactgagattatagaaaacgaagataaaccagtaaaggctataagaagtaaaaaagattcatctatggtagtagcattaaatcttgtaaaagaaggaaaggcagatgctataatatcagctggaaatacaggagccttacttgctggtggattatttgttgttggtagaataaaaggaatcgatagaccttgcttatgttcagcaataccaaatgtaaagcgaggaatgacacttatagcagactgtggcgcaaatgcagattgtaaacctaagaatctagttgaatttgcagctatgagtaatatttattcaagaaaagttttaggtcttgaaaatcctaaggtagcattagcaaatgttggactagaagaaggcaaaggcaatgatttagtcaaaaggtcatatgaagaaattaaaaaattagatttaaattttatagggaatgtagaagctagagaagttataaatgcatacacagatataatcatatgtgatggatttacaggtaatatattacttaaatctgctgaaggtgtagcactttcagttatgagtcttataaaggaaacttttatggccagtacaaaaagtaaaataggagcattacttataaaggatgatttaagaaaattaaaaagttttatagattattctgagtatgggggagctccacttttaggtctaaatggaggagttataaaagctcatggtagttctgatgctaaagctataaaaaatgctataaatcaaggaataaaattttcaaagggaaaagtcgttgaagatattaaccaatttataagcaaatacaatgaagaaaataaaaataacgaagatgaataaactcgttttggaggtttaatatataatgaatacaaaggctggaatattaggagtaggaagttatctacctgagcaatcatatgataattttcacttcgaaaaaataatggatacatcagatgagtggataagtactagaactggtattaaggaaagaagatttgccaaagagtctgaagcaacttctgacttagcatctaaagctgccttaaaagctatagaatgtgcaaagttaaacgtagaggatatagagctgattatattagctacaattactcctgatatgtctttgccttcaactgcatgtatagtacaagatgcaataggagcagtgaatgctactgcatttgatatatcagcagcttgttctggatttgtatatggagtaactattgcaaagcaatttgtggaaacaggttgctataaaaatgtgcttgtaataggagcagaaacttgttctaagtttttaaattatgatgatagaacaacagcagtattgtttggagatggagctggagcagctgttattggtcctgtaaatgagggtggaatactgtctacacatatgggctctgatggtaaaggaaaagattgtttaaaagtacctgctggaggttcaagacttaaggcaagtaaagagactgtagaagctaatctacatacaatagaaatggcaggtagtgatgtgtttaaatttgcagttagaaagatggcagaaacttctttaagagctcttgaaaaagcaaacctaaatacaactgatatagactacttagtgccacatcaagctaatataagaatcatacaagcttcttctaagagattagagcttgatatgaaaaaagtttatgtaaatatagacaaatatggaaatatgtctgctgcatctataccagtagcattagatgaagcttatagagaaggtaaaattaaaaagggtgataatgtagttttagttggctttggtggaggtctaacttggggggcttcagttgtcaagtggactttatagtataaaatatctaaaatgatttaattaacaaaattaaacttatacacaaaataaagttgattaataataaaaagtttacttttatgatttcaagtgaaggagaattgtatgaataaaatttgcaaaatattaaatataaaatacccagttatccaagggggaatggcatgggtagctactgcatcattagcaagtgctgtatctaatgcaggaggacttggcataatagcagcaggaaacgcaccaaaagaagctataaagaaagaaattgttgagtgtaaaaaattaacagataaaccttttggagtaaatgtaatgcttatgtcgccatttgttgatgatataattgatttgattatagaagaaaaagttcaagttattactactggtgctggaaatcctgcaaaatatatggatagattaaaggaagctggaacaaaggttattcctgtagtacctacaatagctttggcacaaagaatggaaaagttaggagctacagcagtaatagcagaaggtactgaaggtggaggacatataggagaacttactactatggtcttagttccacaagttgctgatgctgtaaacatacctgtaatagctgctggaggaattgtagatggtagaggaattgcagcatcatttgcattaggtgccagtgcagttcaagtaggaactagatttatttgcagtgaagagtgttctgtgcattcaaactataaaaacttagtactaaaagcaaaagatagagatgcaattgtaacaggaagaagtactggtcatccagtaagaacattaaaaaataaactatcaaaagaatttttaaagatggaacaaaatggagctactcctgaagaattggataaaaaaggtacaggagctttaagatttgcaacagtagatggagacatagaaaaaggttcatttatggcaggtcaaagtgctgctatggtaaaagaaataacaccttgtaaggaaattatagaggctatggtaaatcaagcaagagagattatgccagcaatagaactgtaaatcaggaggagcaagatgggaaaagttgcactagtattccctggtcaaggagctcaatatgtaggtatggccaaggatttatatgaaaataatgctgttgctaaaagtgtaatagatgaggctagtgatgccttaaatatggatttaaaaaaccttatgtttaatggaaatgaagaagaactttctaaaactgaaaacactcaacctgctatggttacacatagtgtagcagtattaaaagcggtacaagctcaaatagatttaaaatataatgcatgcttaggattatccttaggagagtatagtgcgttggttgcagcagatgcaattgactttaaagatgctgtatgtttagttaaaaaaagaggtaagtttatgcaggaaacagttccagcaggtgttggagctatggcagcaattttaggtttagatagaaatgtacttgaaaatgtggttaaagatatacaaggaggtattgtagaagtagcaaattacaattctcctggacaaatagttatatctggtgaaaatgaaaagatagaagaagcaatggtaaaatgcaaagaagcaggagcaaaaagggcagttaaattaaatgtaagtggaccttttcactcatcaatgttaaaagaagctggtgtaaaattggccagtgaattagaaaaagttaacataactaaacctaaagttgatgtggtggcaaatgtaaatgcagattactataaaaacgaaggtaaagacctgcttataaaacaagtaagttcatctgttctttgggaagattctatagaaatacttttaaatgatggatatgatacttttatagaaatgggacctggaaaaactttaaaagcatttattaagaagatagcttccaataaaaaagcaaatgtcaatatttataatatagatggtatagattctcttaatgaatttgtacaaaattatagaaatggagagatataatgataaatcttacaggacaagtagcagttgttactggtggctctaggggtataggaaaagaaatagcaaaaaaactagcatcttttggagctgatgtagtaatcaattatacttctaaagaagatgaagcactaaaaactaaaaatgaaatagaaagtatgggggtaaagtgtacctctataaaatgtgatgtgtctaaatttgatgaagtgaatcaaatgatagattctgttgtaagcgaatttggaaaaattgatatattggttaataatgcaggcataactaaagatggtctgcttatgagaatgaaagaagaagattttgatagagttatagatataaacttaaaaggtgtctttaattgtacaaaagcagttactaaacctatgatgaaaaagaagtatggaagaataataaatatgacttcagtagttggaattatgggtaatgcagggcaaactaattattgtgcatcaaaagcaggtgtaattggatttacaaaagcttctgcaagagagttagcatcaagaaacataaatataaatgcagtagcacctggatttatagaaacagatatgactagagtactaagtgatgatgtaaaagaatcaacactagcaaacataccaaagaaatcttatggtaaaccagaagatgtagccaatgccgtagcatttttagttagtgacatgtcaagttatataacaggacaagtaataaatgtagatggtggaatggtaatgcaataataatttaaaaagtagagaaatctattaaaataaaaaattttaggaggtacacaatgtttaataaagttgtagaaataataatagagcaattaggagtagaagataaagaaataactatggagacatcattaatgaaggatttagaagcagattcattagatgcagtagaaataataatggcacttgaagatgaatttggtatagaaataccagatacagaagcagaaaacttcaaatctataggagatatagttaagtatatagaagctaataaatagtcgagctttaaaaaagtggaggtatccgatgaataaaagagtagtaataacaggacttggatgtgttacgccgttgggaacgggaaaagaagagttctggagtaatataaaatctggagtatctggtatagataaaataactaattttgatgctagcacatatcaaactcagatagcaggagaagttaagaattttcatccagaagaatatataagtaaaaaagaattgaagagattagataaatttgctcaatttgcaatagtatctgctaaattagcagttgaagatgcaaatcttgatttagataaagttgatagagaacgttttggtgttataataggttctggaataggtggagttgaagctatagaaactcaacataaaattcttttggaaaaaggaaataaaagagtaagttcactttttgtacctatgatgataggaaatatggcagctggtcaagtttcaatatttttaggagcaaaagggcctaacactaatgtatgtacagcttgtgcatcaggaactcattcaataggtgatgcttttaaggtaattcaaagaggtgatgcagacatcatggtagcagggggctctgaagctgctgtaacaggtcttgcttttgctggattctgtaacatgaaggctatgtcaactagaaatgatgaccctaaaactgcatcaagaccgtttgataaagacagagatggttttgtaatgggagaaggagcaggtattgttatcttagaagacttagaacatgctttagcaagaggggctaaaatatatgcagaagtagttggatatggtttaactgctgatgcataccatatgacaactccagctgaaaatggagagggagcagctaggtctatgaatatggctttgaaagatggaaatgttccattagaagaagtagattatataaatgctcatggaacttcaacttattacaatgatttatatgaaactatggctataaaaactgtatttggagaaaaggcatatgacttatgtgtgtcatcaacaaaatctatgactggtcacttattaggagcatcaggtgctatagaggctgttgtttgtgctatgagtatagaagatagttttgtgcctccaactataaacatacaagaagttggtgaagatttggatttagattatgttccaaatcaaggtaaagaaaaaaatattagatatgcactatcaaattctttaggatttggtgggcataatgctacaatagtactaaaaaaatatgtataaataaatattaaatataaaactaaaaaacaagcacttgttttaactgtataaatttatattagcttaaatttaaagtctcctaaattattttaggagacttttttattaagatttaagtctagcatatgttgtaaatcattttgatatattgtattattaattattaagaggttatttatatatgcaagttttcattctacaatatacaaaaggaggactaaaattttgaattttagactaccaaagaaaaggttacccaaaaagataatttttatatgtataatacttattagtattattttgtttataaagtatgaccaaaatggattgaaagaaagagaaattataaataagggaaaatatatgtctgaaagccttgtggcagataaggagtatgatgaagcaaaaaaagtggttaagacttctttcgaatctattccagaaaaaaaatacaataaagtatataatgaagtttgggatatgttaaagactatttcatatgttccagatggaacgaagatagtcattgattctttagaaaagatgagagaatcagatgtgaaattatctgatgaatgtagatttaatatagaaaaaagattagcatcagtgtatataatggataataattattctaaggcagtagatttaactgtaaagtctataaaattggctgagaaattggggaataattatgaaaaagcaagactagatgttgatttggcgagcatatttttaaatataggtagctatgaaacaggagagaaattaataaaggattcttttaaaatagatattgatgaaggtgaaaaaaatggaatggttagattatatgctattataaatctagcagaaatatatgtagaagagggagaatatgataaagctattgaaataagtagcaggataaaagattataaaaagtttgtaaatacggataattacaatgattttgatataatggcctctataatgaagtcaaatgcgtatgtgggcaaaaataatatacaaaaggcaaagacttttttagaaaaagctgattatcttataaaatcagatagaacagtttatatattagataaagatatgtactattatatggcaatgggaaacttagaatataaaagcgaaaattataattctgcaatagataattataaaaaaagtttagagatatctaccaaaagaaagttaactcaggagaaaataaaaaatttaaataagatattaaatatatatgaaaaacaaggaaatatagaatctttaaatgagtatcaaaagatgttaataaatgaatataaagagaacaaaagtataagagattcagagactagtttctatataattgataaagtatcaaacgaaagtaagctatttgaaaaaactaaaaaagaaataaaatattataaaatattatttacagtaattttaattgctatattagggtctacttttttatacaaccgattgaagtattttaaagcacaaaatttacatgatggtcttacaaatgtttataatagaaaaagttttgatattatgtatgaaaagtacagagagaaagatgataattttgcacttgtgatgatagatattgataatttcaagctcataaatgataattatggacataaatttggtgacactgttataaagggaataacaaataccatttgtgttatgttagaacaagatgataaagtctttaggtacggaggagaagaattttctgtattaataagaaataaatctggtgaggaagtagcagatataattgacaatataagggttgcaattgcaaataaaaagtggaatgatgatgtgactgtgactataagtgcaggtgtagctcatatttcagatagcaaagatgtactagaagaagctgataaaaatttatataaagcaaaacaacttggtagaaataaagtagtatataagtaattatatactatataaataagaggtataaatatgaaacaatcaatagctatagtaactgataaaataactaaactatcatctttcttagaagaaaatatacgtttggttttaggtaattatattgatataaaccactattatctggaagttttaaaagagaatgataaaatacaaggtgattttgtactagtaatgaatgatgatagattaaacagtatgagaaagcatttagtacaagatagtaagattatagtgataaggagaacacttaaagaaaatgaaatatatggattattttcaataccaaatggaactgaagtattggttgtaaatgatacaaaagaaactaccttagaaacgataagcttattttacaaaataggagtaaaaaatttaaagtttactccatatattgaaggaaaaatttataaaaatatagacatagctataacgcctggagtaaaggaaaaagtaccaagttatataaataaagtaatcgaccttggtaatagatatattgatatatctacttttatagaaataataaatggtcttagaattgatgttaaagaaatacgtaaaaatttaatggcatattctgagagtttaataagtttagataatggagttaaagataattataggcaactgtttttaaaaatagaagaacaagatgttatattgaatctatcaaaagatggaataatatttacttcagcagatggtataataaacacatttaataaagaagctttaaaaattttaggtataaatgaaaatccacaaggcaaaaacatagaagatatcatttctgaagatttaaatattttacttgaagacaaagaaataattgatgaagtggtatttacaaataaaaaatatataaatgtaaataaaaaaagtattttttctatggggaataaagctgggatatattataacttacaagaaataacgtatataaaaaaattagaacaaaatcttactaataaattaagagaacaaggtcagatagcaagatatacatttaaagatataaaaactaaaaataaaaatatggtaaagtgtgtagaattggctaaaaaaatatctaaatcagacctttctgtattaataataggagaaagtggtactggtaaagaattattatcacaatcaattcataatgcttccaatagaagtaatcaaccatttatagcggttaattgtgcagcagttccagatagtctattagaaagtcaactgtttggatatgaaaaaggctcttttacaggagctttaagagaaggaaaaaagggtctatttgaacttgctaataatggaactatatttctggatgaaattggagatatgcctccattgctacagacaaagttactaagggtattacaagaaaagcaggttatgcctataggttcccataatgttataaacatagatgttagggtcatagcagcaacaaacaaaaacttactaaagatgattagagaaggaaaatttagagaggacctgtattatagactaaatgtattgccaatagatgtaccatcattgaggaatagaaaagaagatataataacacttatgaatttctttttgaaaaacaatgtaagactttcgccagaagttataactattttagaaaaatataattggccaggaaatataagagagttacaaaatgttgcttcttatgtaagtctaatgtgtgatagtatggtttttagagatgacttaccaccatatataagggtagaatgtgctaacaattatgaagatggatttggttatacaaaaaaagaatttgaggaaatactgaggattctatatgaaagaagagagtcatcctctggagttggaagagggtttataatcgaaaagcttatacaggaagggattgagatttctgaaagcaaagttagaaaggtgctatcttatttaagtgaatgtggatatatatcatctaaatctggtagaggaggaagtcaaataacctcagaggggataaaactttataataatataaattaagctaagtatttgatattgaaatcacatattttgaatttagatatttaaataataaacttttatatttatagagattaatttatactatgtcagaaagaatattgtaatttataattaaatattaataggtttttaaaataggattagataggtaataggttaagttagaataacccattacctatttttatttgtaagaaaagtgtacatagagttaaaagtaaaaaatacaactaataaaactattgaaaacactagataaataataaataaaaataattataaattttggcatatatattgctaatcatagagataagacgacaaaataattgggaggtttaatgatgaaatacaaaacaacagggacttgtgctacagaaattgaatttgaagtaaaagaaaataaagttacaaatgtaaactttataggtggatgtgatggaaatttaaaagggctaaaagtattagttgaaggcatgaatatagaagatgtaatacaaaagttaaaaggaatagagtgtaaaacaaagccaacatcttgcccagaccaactgtctctagcattggaaaattatatgaatataaagtaatacataaaacaatcgattagttaggagtttaattatgaaaccaataatagggattttaggaaatttaataataatggaaaatggtatgtttccaggtcttgaaaggtcatatgtaaataatgattatataaatgcagtgctaaaaggtggcggtagtccagtaataattcctgtaaatacagataaagaagttataaaaaaacagattgaaatggttgatggagtcttaatatctgggggatgggatatcaatcctcaactgtatggagaagaaacaagagaagaaacgacatttatatatccagaagtggatgaatttgatttaattgcaataagtatagcattagaacttaaaaagcctatattaggtgtatgtaggggactacaaattttaaatgtaagtttaggaggaactttatatcaagataataatcttatagaaggaagttatataaaacatacacaatcttctaaaagacatgtagctactcataaagtcgatgttaaagaaggaagtattttagagggaattttaggaaaacaattacttacaaatagttatcatcatcaaagtgtcaatcagcttggaaaaggattaaaagccatagcatactcaaaagatggtataatagaagctattgagaaagaggaggaaaattttgtagtaggagtacagtggcatccagaaatgatggtagattactgtgataaaatggaaaaactatttaaatattttataaatatttgttcaaatttataatataccttggggggattgaacatgaacgaaaagaacaaaatgggattaataagtattatacttttaggtattaatgcagtagtaggagctggagtttttctattaccaggagatgcaatgaaatcatttggtgtagcaagtatatttgtatatatatttgatatgttgttagttttatctatggcattctgttttgctgaggttgcaggtaaattcaataaaaatggcgctgcctatgtatataccaaagaagcttttggagatttttgtggttttgaagtaggtcttatgaaatgggtaataggatgtatttcttggggagctttaatagtaggttttcctacatcattatcagcagtatgggctccagcaggtgaaccacatatacaaaaaattataattgtagccatgatagttgggcttacaattataaacttattaggtgtatctctatcaaaaattgtacaaaatgttataactgtaggtaaactaattccattaatactatttataggaataggtatattttttataaaaggagttaattttacttcttcaacaatggtacctccaggagctggagcaacagagtttggagcagcagcacttttaatgttttattcatttacaggatttgaatctatagcagttgcagcagaagatatggaaaatccacaaaaaaatataccaatagcaattataagtgtaatagtaattgcatcaataatatatatattaaatcaagttgtatgtgttggtatactaggagattcgttatctagtacatctacaccagtggcagatgctgcaagaatatgctttggaaatatgggagctggattggttacctttggaacattggtttctgttggtggaatttgtatgtgtggtgcttttgtaaatccaagaagttgtgtagctttagctgatgataaaatgttaccaagaatatttgcaagaaaagataaaaaaggtacaccatatgtagcgataatagctactatgttaatcactataccaatagctctatctggaagttttgctgaattagcagcaataagtgcagttgctagattcatacaatacataccaacatctttatccgtattagtgtttagaaagaaaagaccagaattagtaggtacttttaaaactccttttggagcagtgattcctctaattgctgtatgtgttggaacatggttgttattccaagcatctatgcatcaattaattatgggattaggagctttggcaattggagtaccattatactttataatgaagtcttataatagaaaagtctgtggtgaaaatttaaagaaaatagtttaattatgttataagaatttattgagttaaaattagacattggcagaaaattaaatacaaataagtatctataaggctatattaaaatattattaattttttattttaatatagccttatattgttatcaataaatgaaaaatattgtaacaacagaagaacaatagtattatgtttatagataaaaaacttattaggaggtaaatttatgccaacaataacattaaaaaatggtgtagacgtacttattagagaaggtgtaagagaagatgcttaaagcattatagatttttataatgaagtgggtggagaaactcattttctgtcatttggaaaggatgaatataaaatatctttggaggaacaagaaaatgctatagaatcagcaaaagcatctgataattctgttaaactgattgcatttatagatgatgaaatagttgggattgcaacgattgattctaatcaaaaagcaaaaggaaagcatgttggagtattaggaattgttgtaaaagaaaaatattggggaattggattgggtaaaaggcttatgttagaccttatagaatggtgtaaatcaaatggaataaccaagaagataactcttgtcactaatgaagaaaattataatgctataggattatacaaaaaagttggatttgaagtagaaagcatactaaaaaaagaatgttattataatggtgtttatactgatttaataggaatgtcacttttattgggaatataattagtgtacattttatctcgaaaaaagtatattaagtatggtataattaaaaaagaatataacttaatataattttggaggacgaattatgaaaaatctgtgtaaaatatcagatgattatttaaacagcaagcttaagtatttaaagttattatcaaaacaatatccaagtatatcaaaagcaagtacagaaataataaatttagaggctatattaaatcttccaaagggaacagagcattttataacagatgtacatggtgaatatgaaccatttgtacatgtattaaaaaatggttctggtgtaataaagagaaaaatagaagaattgttttcaaatacaataagagacagcgaaaaaaaaatgttagcaactcttgtatattatcctgaacaaaagttagacctaataattaagcaagaggaaaatatagatgatttttatagaataaatatttatagacttatagaactttgtaaatatgcttctagcaaatatactaggtctaaagttagaaaactgttaccagaaaattttaaatacataatagaagaacttttgcatgagcatgttaaaagtgaacataaagaagagtattataaaagtatagttgaaacaatagttgacataggaatagctaaggagtttataattgctatttctacagttatacaaaaattggttgtagatagacttcatgtaataggagatatttatgatagaggtccaagaccagatataattgtcgataagcttattgaacatcattgtgtggatattcaatggggaaatcatgatatattgtggatgggtgcagcctcaggtgaaaaaacttgtatagcaaatgcactgaggatatcagctagatatgcgaatttagacattgtagaagacatatatggaataaatctgttgcctttagccacttttgctatagaaatgtataaagatgacccttgtaaagaatttattccaaaggttaatgaccaaagtgtaacaacaacagaaaagtctttaatggcaaaaatgcacaaagcaataagtataattcaatttaagcttgaaggtgaggttataagacgaagacctgaatttgaaatggaacatagacttttgcttaatatgataaactatgatgaaggtacgattactttaaaaggtaaaacatataaattaaaagatacttatttacctacaatagacaaaaaagacccatataaattaactatggaagaaagaaatgttattgataaattagtatcttcatttagaggtagtgaaaaattacaaaaacatgtttcatttttgttttctaaaggaagtatatatttaaaggctaactcaaatttactgattcatggatgtgtaccattaaatgaagatggaagctttatgtctatgaatataatgggaaaagagtataaaggtaaggctcttatggataagatggagtctctagcaagagaaggatttttctttaaagataaggcagaagaaaaactatatggtatggatattatgtggtatttatggactgggaaatgttcatcattatttggtaaagatgatatgactacatttgaaagatactttatagaagaaaaagagactcataaagaaaataagaatccatattttaaacttagagaaaatgagatggcttgtaaaagattatttgaagaatttgatttagagcttgatgaatcccatataataaatggtcatgttcctgtggagagtaaaaatggagagagcccaataaaagctaatggtaaaattctcgttatagatggtggtttttctagggcttaccaaaaaactactggtatagctggatacactttgatatacaattctagaactttgcaattagtatcgcatgaaccatttaattctgctgaagaagccattgcaaatgaaagtgatatcttatcgacaactgttgtagtagagcataaggcaaagagaaaaatggtgagagatactgatgaaggagtaaaaatacaagaggaaatagaagatttaaaactacttttaatggcttataagaaagggctaataaaagaaatgtagatattatagaggcacttcataattgaagtgtcttcttgttaatacttattaaatatattataaagattaataatagtagtttatattatacttactaagtgaatccaagataaatgggttcactttttttatttataaacattattaaaaaaatatagatgttttggttatattccttgtcctttataaatagaattatataaacaaaggaggaggacaagagatgaataaactttctgatgaaataataaactctctttctacaactataagagaaaaggtagaaaaagtctcaaacaataatctgaacatagaagaaattaggttacgctcacaaaaaccattgatactaaatgcaaactctaaagattatttttacaatcaaaaaactatgacacttgatttaaatcaacaaaactcatatgtagtaacaagagaagatgtagagcaaacttttcaaataatatgtaaatattcaatacattcatttatggatgacataaaaaaaggattcataactttgagaggaggtcatagagtagggttagttggaaaagcaatagtagaagatggacaagtcaaaaatataaagcatatatcatctttaaatataagggtatcaagggaaattattggatgctcggataagattttaagtcatattataaagggaaaaaatcagattaataatactttgataatatcaccacctcaatgtggaaaaacaactttaataagagatatagtaagaaatttaagtaatggtaatgaagattatggatttaaaggtttaaaagtagctttggtagatgagcgtaatgagatagcaggagcttatctaggtgttccacaaatggatgtgggaataagaactgatataatagaaacttgcccaaaagatttgggtattacgatgcttttaaggtctatgtcaccaaatgttattgtgacagatgaaattgggagtgaaaaagaaataaaggcattatacacagcattaaatggaggtataggattaataactactgtgcatggagattcaatagatgatatacaaaatagaaaagaattaaatagacttctggataaagagttatttaaaaaggttataattctttctgcaaaaagaggagcaggaacgattgaaaaaatttatgatttagaagaaaagagatggtattttgcaaattaaaataattattatagctctcttggtaggaagtagttatttgataggtgaacaaatatacaaaacttatactcgtagacataaacaattaaacgatttaataagagttttagaaattttgaggatggatttatctttcggactttatacattagaagaaatctttaataggataggtggaaataaagagttttgtttttggaaatttttctatcaaatatcagaaggacttcacaatgaacaaagtaaaactttggaaataataatatcagaaaatattgatgtcttaagtaaagaaacttatctaggcaataaagaaattgaggaactgaaaaatctaatacttactttagggaaaagcgatatagagtcacaacaaagaatgatagatttatctatagaaaatttgaaaaaacaaacctatgagacaaaggaagatataaacaaaaaaggcgtattgtataaaaaattagtgacattcataggtataggtatatgtattatattgatttaatatggggaggtttattatggaaatatcattgatattaaaggttgcaggtgtcggtattctaatatcagtattgaatatgatattggaaaaaacagatagaaaagattgggcaggtcttactacattagcaggtgtaataatcgtattgggtatggtaataacagaaataagtgacttgtttaatactgtaagaacaatgtttcaactttactaaaaaggagggagtaatttggaaataatgcaattaataggaattgcaatcatttcaactacactctgtttagtaattaaaaaagatagaccagagatagcaaatttcatagcaataataactggagtaataatactattgtcagttatgtttaagctaaattttatagtagatagtatacaagatttggctaacaaggctaacataccgactatgtatatatcattaataataaaattaattgggatagcatacttaatggaatttgcgatacaactttgtaaagattgtggggaaggaaacattgcttcaaaactagaatttggaggtaaaataatagttatgtcaatgtctttccctatacttttgtccattgtagaaatggtggtgaatataattccatagatgtgtatcttggaatgaatataagtatattagagaactttcgttgtattgaggtttatagagtgaagagaggcatggttgcttatgaaaaaaagatttttaccaatgattataggttttttatttactttcttttttgtaaatatctttgctattatgatatttgctaatgaagtaccaagtagtgaagataaagaatatggtgaaacaaaaaatagcatagataaatatatagatggtcaattagacaagctagatataaatgagattcaagactatataaataaagaaatagttattaatgatgttaatttaaaatcatttgtaaaagatttaattagtggagaaaaaaatatcttagatttattcaataaagatggattgaagatattgatgtttgatgaatttaaagcaagtttaaaggtagtagcagtaattttggtactggctctgttatcatctattttaaagagtctggaaaactctttttcatcaggtgcagtaagtcaaatagcaacatatataatatttatcacaatggtatcacttacacttattggttttaaagatgtattacagatttgttatgatgcaatagaccatactgtaggtcttatgcaagttataatgccaatattaataacatttttacttttaattgggttcccaataacgtcgactactttgaatcctatcttcataggaggagtaacatttataaatgtattttttaaaaattttctatttgtatctattactgttgcatttggaattttaataataaacaatttatcaaaaaatataaggctaaagagatttttctcctttgtaaaacaaataaattatgtttctattggagctatgtttactgtttacttaggtcttgtatccatacaaggattgtatgtaaccagttttgataaattcagtgtaaagactgctaaatttgctataggtaattttattcctgttgtaggtggatttgtatctgactctgtggatattttattatcttcatctcagcttataaaaaatatatttggaggaatagggcttatcttacttgttggaatttgtttacttccagtaataaaaattttatcagtaatagtagtgtacaaattagcagcaataattgtagagcctgttggagaggatggaatatctaattttttaaatgaagtggcaaatttaatgataataatgctagcatcagtaattgctataacagtaatgttctttgtaactgtagctatcttgacctcgataagtgtcgtaagtcaagggtaatttatatatcagtgaaaaataattacatttaatctaatgtttttagagaggaggatgctatgttagagggcataaaggcatggatagttagtgttttgataggagcatttatagtaaatatagtagatatgattttaccaagttctaagataaaaccttatgtcaacctagttttaaactttatgtttgtatttattgtaataactccagtagtaggatttttttcaaaagatatgagtttagaagatagaatattaaaatctatgggaaactacaacaagcagtatgtagatagtacaaatgctttggcaaaagagactggaaataatagtctatccaagggatatgaggatgggttaaaagaagtacttaaattaaaacttgatgaatatggttatgatttagaagatatagagcttaatggggcaaatataaataatataaaaataaaagaaaagaataatagtgcaaaaagtaataacagttccaatgaagaaaataaaaataatagtactaaaagagaggaagaaaacataaactctaatgacaaagaaaattctaaacaagtcttcaaaaaaggtacagagtatgggttgaacctaaatgaagaaaaattaaaaaacgacttaataaaggtgctggatgtttctatagaagatatacaaattgataaataggagttgggagaatgttgaaaaacttaaatgacaaagataagagaaaggtatattcactaataactatagcaggaatatgtgtggtttcattagtattattatcttgttttcctagtagcaaaagtgataaacaagttggaaaaacagagactaataaaaatgctgaaaagcaagtcactaaaaaacaagaaaaagatgatttagagtcaaaattaacagcaatactatctaaaattgatggtgcaggagacgttgatgtaatggttacatttgaatcaagtgaagaaatacaacctgcttttaattcaaataatacaacagaaacaacagaggaaaaagatgcacaaggtggagaaagaacagttacgacttctagtgaaaataaaacaatgataacttcaaattcaagtgaccctgtagttataaaaactacagagccaaagataaagggagtgatagtggtagcaagtggagcaagtgacccaagtgttaaagagacactttatagtgcagtacaaacatcattacaagtagctggtcatcaagtagaaatatattctaaataaatacatataaccggggggataaatgaatgaagtttaattataagggaagaggatttgtaataataactttaactgcaatgttagtggtagtaggaacagtgaattatcaactaagtaagaaatctttattagaaacatcaaaagagtttaaggcatatgaagaagcacagttgcaaaaaaatactgatgatagtgatagtagtaagacagaggattctagtaatgtagataaacaaggtggtaaggaaagtgctgatattgatatagtcgatagcaaagctagtaaagtaaaagaaaaggcaactgagacaagtaaggaaataaaagctcaattatcatcagagaaaaatatgaaaaaggcatcttatattttagatatgaaaatgaatagagaaaaacaaagaaatgagttagttcaagatttaaatgaaatgataaataatccatctacaacagaagaatctagaaaagaagcttctaatatgaaattaaatatagttaaaattcaagaaaaagaacttcaaatagaaaaccttttgagtacaaaaggatatgaagaagcgttagtttatataagcgataacaaagttaatgtagttgtaaatgaagctaaattagaaaagaaagatgcagcaaaaatatttgatttagttgcagaacaagccaatgtgaagtatgaaaatattaaacttacaaataataatagtaataagtaaagtataaacctcagaattaactgaggttattttcttgcaaagtagacttgtatttggtattattatacttataaaaatagttccttaaaatcaggaggtaagttttaatatggaagataataaatttggacaagtaaaaatatctaatgatgtaatagctacaatagctggtttagcagcattagaagttgaaggcatagaaactacagcaacattaacagataagttgttaaaaaataatggagtaaaaatacaaatcgaagaagaggatgttaatttagatgtaatggttacgataaagtatggaatgtcaataccagatacagcttttaaagttcaagaaaatgtaaaaaatactgttgagacaatgacaggactgaaggtttctcaagtaaatatacacattcaaggaatcagctttaagaaggataaagttgataaagaagaagcaaaagcaactaagaaaaattaatattagccctctgaaaagtcagagggttttttgctggtaattgattttatatggataattaaacttaaaggagaattttgattgatgaaaaaagatagggcacaaaagagtacaacaagagaatatataatgaaacttatataccaaataaatattaataaagaagattttgaaactttagaagataaagtagataattttttaaaagataattcagaacatattataaatagatataaagaacttgcacttcaatactcaaaaaatacaaatttaaagttagaagatactgaaattgaagatgttatagacaagaaatatataaatacagtatgcaaagcattaaaagaaaatcatgacaaaatagatgagttaataaataagcatgctaaaaactggacagtagatagaatgccaaaggtagatgtttctatacttagattgtctgtgtgtgaaatactttatttagacactcctaataaagtatcaataaatgaagcggtagaacttgcaaaaatatattgtgatgataagtctcctaaatttataaatggtatattgggaagtgttgttgatgaaattgggaaataatataataattggaattgatactagctgctatactacttctatagcagctatctctttagataagaaagttatattcaatgaaaaaataatgttagaagtaagggataattcaaaaggtttaaggcaaagtgaagctgtatttcaacatatcaataatttagggattcttagtgataggataaaatcttttaaagataagtttaatgtagaaggagtttgctcatcaaaaaaaccgagacctgttgaaaactcatatatgcctgtattcaatgtaggtcataattttggaaaattattgtctagtatatatggttgtaggttttatgagactactcatcaagagaatcatattgaagcaagtttattaaatagtaaattaaaaaataataataaatttatttctgttcatatgtctggtggtactacagagatacttttaacaagcaaacaagatagtcatcacaatgtatgtgatactaatttaggtaaaattgccaaaataagtattaaaaaagatgataaaagtaagttatacaataattttggatataatatagatataattggaggaagtaaagatattagctttggtcaactcatagatagagtaggaattaagcttggatataaatttccttcaggaaagtatttggatgaaaatgctttaaattgtaatcttaaaatagaaagtggtctgaaaacttctgtaagagatgggtatatgaatttatctggattagaaaatcaggtaaataagattataaatgataatggagataatactaatcaaaaagaatacatatctaaattagtattagattcagtagttagaaatatgtttaaatctttagtatatttatgtgaaacttataatgtaaatgaagtagtatttgctggtggagtttctgcaagtaagtatattcttagagaattaagcatgaagttaagaaaaaagcatatagaagcttattttacagaaccacaatattcaactgataatgctgtcgggtgtgctataataggattgaataactttttaggagaaagagtatgaaactaagagctttagatataagtgaagcaaactcatatattaaaagaattttaataaacgacccaatactttctaatcttaaagttaaaggagaaatttctaattttaaggttcatagtagtgggaatgtatatttatcacttaaagatgaaacatcaaagttaaactgtgtaatttttaaaagtaattttaatcgcaatttaaaattagataatggtgtaaaaattatagctaatggatatatatcagtctatgaaagagatggtgcgtatcaattatacattaatgaaattgaaatagagggaataggaaatttacacatagagtttaatagattaaaggaaaaacttaataaagaaggattatttgaccctaaatacaagatacctatacctaaaatgccaaactcaattggcgttataacatctccaacaggtgctgttataagggatataataaatgtaataaaaagaagatatccgaaagttaatataaagctttatccagtaatggttcaaggagataaatcagctgaagaaatctgtgaagcaattagatttttcaatcatatgaagaatgttgatacacttatagttggtagaggtgggggttcaatagaagaactttggtcttttaatgatgaaatggtagcaagagaggtttttaattctcaaattccgataatatcagcagttgggcatgaaacggattttactatttgtgactttgtgtctgatatgagagccccaacgccatcagcagcagctgagattgctactccatcattggatgatataaactataaacttggaaacataaaaagtaggatgagtaagtctcttacaaatcaaatagagctagaccaatataggttagaaacagtatttaataagataaataactatttagattcgtacacaataaaagataaagttatacaattagacaaaatatatgataaaataatttttggaatagaaaataatttaaaattagaagatgaaaaattagtaaaaattggagcattactccataatttaagtccattagctactatggatagaggttatagtataactcaaaaaaatggaaaagtaataaatagtataaaaggattaaaaataaaggatagtatagatatagtattaaaagatggaaatttagaatgtatgatagataaaattgaaaataaagagggatagtatgaatttaacctacgaagaagcttataaaagattagaaagtattttaagtgaattagaatctaaaaatgctagcttggatgaatctttaagcctatatgaagaaggtataagcctttataaacattgtaataagcttttagatgatgctaaattgaaaataagtaaatttaatcaattaggaatagaagaagactttaaaatagaggaggaataaaattggaatttaaacaatgtctaaaagaaaaagcaagttttgtagaaaaagtacttaaagaatatatgcctaaagaagaagggtatcaaaaaactgttattgaagctatgaactatagtttaagtgctggaggtaaaagattaagaccaatacttacattggaggcttgtaaaatagttggaggaaatgaagatgaagctattccttttgctattgcaattgaaatgatacatacatattcactaatacatgatgatttgccagctcttgacaatgatgatttaagaagaggaagaccaacaaatcataaagtatatggagaagctatggggattttagcaggagatgctttgttaaactatgcttttgaagtaatgcttgcaggctcaatcaataaagaaaatccagaaaagtatctaaaagctataaatgaaattgccaaaggtgctggtatatatggaatgataggtggtcaagtagtagatgtagaaagcgaaaataaacaaattgaaaaagaaaaattagattatatacatatgaataaaactgctgcaatgatggtaggctgtatgagagcaggagctactataggtggagcaaattctgaacaaatggaagaaataactaaatatgcaaaaaatatcggattatcattccagatagtagatgatatactagacatagtaggagatgaagctaagttaggtaaaaaggttggaagtgatatagaaaatcataagtcaacatacccatctcttttaggtttagataaatctaaagaaattgcacataatttgattgatgaagcaaagaaaagtatagaaaaattatctgatgatgtagattttttaaagggattggctgaatatataatagatagagaatactaaaatatacagctaaaatcgaggagggaaaaatggattttttttcggagatttttaacaatggggctttgggaataagtctgattgcttgtttcttagcacaatttataaaaatatttactggtaaggaaaaaagaattgagttatcaagaatacttatttcaggaggtatgcctagttcccatagttcttttgttacaagtttagctacagtggtaggtattgaaaaagggtttaattctactgattttgctataattaccgtacttgccttaattataatgtatgatgcagcaggtgttagacgagctgttggtaaacaagctactatattaaatcaaatggtggcagatatacagcatggaaagcatatagagcagaagaaattaaaagaattaataggtcatacaccactagaagtttggtttggagctttacttggaatagtaacagctttaatattgatgtaaattgaaaatttacagaataaaggtgaggataatatgtataaatatttagataaagtaaattctccaaaggatataaaaaatatgagtatagaagaaatggatttacttgcaaaggatataagaaagttcttagtaaaatctgtttcaaagacaggaggacacttagcttctaatctaggagtggttgagttaacattagcacttcataaagtatttgatagccctaaagataagattgtatgggatgtagggcatcaatcttatgttcataaaatagttactggaagaaaagattgttttgtatctttgagacagtttaatggactaagtggttttccaaaggagaatgaaagtcctcatgatatttttgatacaggacatagcagtacatctatttctatagctacaggtattgcctgcgctagggatataaaaaaagaaaactatagtgttatatctgtgataggagatggttctataacaggaggtatggcacttgaagctttaaatcaattaggatatatagataccaatatgatagtaatccttaatgataatgagatgtccatagataaaaatgttggaggaatgtctaaatatctgtcaagtattataagaaactcaacagttgagaaaatgacagatgaagttgataaaattttaaatgttacacaaacaggtgaaattttatctaagactgcacatagatttaaagataaactaatgtatagcttttctcctcaggactgttcattttttgattcattaggtataagatattatggacctatagatggccataatactaaagaactaatagatatattgagaaaagctaaacacaaaaaagggcctgttcttttacatgtaattacgaaaaaaggaaaagggtacagatttgcagaagaacaacctgataaatatcatggagtatcaaagtttgatataaagacaggtgttacatctgcaaaagttaagtctatgtcaattagtgttggagaaaaacttgttgatatggctaataataatgaagatatagtagcaataacagctgcaatgccatctggtacagggttaaacctgtttgaaagtgcatatccaaaaagatattatgatgttggtatagctgaacaacatgccacaggatttgcagcaggtcttgcaaaaaatggtatgaaaccttactttgctgtgtactcatcatttttgcaaagggcatatgaccaagttattcatgatgtatgcataacaaaaaagccagttacttttcttatagatagagctggattagttggaaatgatggagaaactcatcatggtatgtttgatttaagttacttaaattctattccaaatattgtagtaatggctccaaaagacacaagagagatggagcttatgatggatttgtcattaaaattagattgtccactagcaattagatacccaagaggaagtagttattacctagataagggagaatatggagagattgtactgggtaaatatgaggtattagatgacggtcaagatacagtcatactttgtattggaagtatggtaaaacatgctttagaggctaaagaaatattatcaagagaaggaataaatccgacaatagttaatgctagattcttaaagccaattgatgaaggtatgttaaaagcattattaaaaaatcataaaaatgtagttactatagaggataatattgtaactggaggatttggaagtagaataaacaagtttattatagataatgaatataacgtaaatatacttaatatagcaataccagaagaatttgtaaaacatggcaatatagatgaattatatgattttgtaggattatcgccaaaaagtattgctgataaaataaggaaattagttattgagtaaaaatctaatgtagatattgtaaattaaaatttatataaaatatagaatttatcaattagaataaatatcaagtgtgttacttcaagctactttagttatcattaaagtagcttttaacagaaaggtaattgtatgaaaaaaagaatagatttattattagtagaacaagggtactttgaaagtagagaaagagccaaaaaagcaataatggctggattggtttttgttgataatcaaaggtgtgataaggctggtacagaagtaaaagaagattgtagtatagaagtaaaaggaaatccaataccatatgtcagtagaggtggtttaaagcttgaaaaagcaatgaaaaactttgatttgactattgatggaaaggtatgtatggatataggggcatccacaggtggttttacagattgtatgctcaaaaatggagcaataaaagtattttctatagatgttggttatggtcaacttgcatggaaattgagacaagatgatagggttgtgtgtatggaaagaactaatataagaaatgttacaatagaatatacaaagcagtttgctgattttgcgtcaattgatgtgtcttttatatcgttaaagttagtacttccaaaggcaaaggagttagtacgtcatgatggggaagttgtcgctttaattaaacctcaatttgaagcaggaagagaaaaagtaggtaaaaaaggagtagttagagaaaaatctacacatatagaagttataaaaatgatttctgatttctcagtcgaaaatggatttgagattttagggttagatttttctcctattaaaggtcctgaaggtaatatagaatatctaattcatttgagaaatggaaatgaaggatatgaatttgatggtgagacatacaataacaaaatagtagaagttgttgaagcttctcataatttagacaaataggttaaaagggggcttagatttgatcctcgaattatatatgaaaaattgtgccttagttgaagaactaaggttgaatattgataaaaacttaaatatacttacaggtgaaactggttcaggaaaatctataataatagatgcacttggactttgtttaggtgataaatatgataggtcttttttaagaaaaggaacagataagggacttgttgaggctgtatttttttcagacaatagatatcttaaaaaaatattagaagaaaatgatataagtatggaagatgataatttattggtaataactaggttgatatactcagatggtaagagtactgctagagtaaatggaaggactgttaaagtgtctcttcttaaagaaattgcatctacacttatagatatacatggtcaacatcaaaatcaagctttgttcaataaagatactcatttaaaatttctagacctttttggagaaaatgaattggaagagtttaaaattgcttataaaaatgtgtaccataagtatagtgaagtaaaaaaagctttaaattgcttgacagaaaataaagatgagatgcaaattcaacgagaaatagatttattaagatttcaaataaatgaaattgaagctgcaaatctaaataagaatgaatatgaagatttattaaaacaaagagaagtttatagaaatagtgaaaagatatataataatctaaattcgagttatagcaagttacataatggtgagtataatgttattgacctaataggtcttgcatctaaggaacttaatgacatatctaaatatgacagtgttttaagtgaatatagtgatactgtagaaagaattatgtatgagttacaagacatatctggtgagataagaaattacaaagataatatagactttgaaccttatgagctagagcagattgagcttagaatcgacgaaattaataatttaagaagaaaatatggagacagtatagatgatatatttgagtattatggaaaaattaaagatagattagatgaaatattaaatagagatgaaagagttgaacagttaaaaagcaaactgatgaatatagaagaagatttaaaaataaaagccagtaaattgactaaagcaagaatagaagtagcaactactttagaaaaaatacttcttgatgaattaaaaagcttaaatatgaaaaatgtaatgttcaaggttaattttgaaaaaggttcatttactttagatggagtagatgatattgaatttatgatatcttttaacttaggagaagatattaagcctatatataaagttgcatcaggtggtgagatgtccagatttatgttagcgtttaaaaccatattggctgatatagatgatattgatacattagtgtttgatgagatagatactggaataagtgggatagcagcacagatagttggtgagaaattgagtgatatagcaaagaaaaaacagataatatgtataactcatttacctcaaattgctgcaaatgcagacactcattattgtatagagaaagatacttcaaataataggacgtttaccaatgttagtaagttaaatgaatctcaacgaaaaaatgaaattgccagacttatagcaggtaacaatataacagaaaaaactattgaacatgcaagtgaaatcattgaattggctaaaaaatgttagtgaaaaacaagcattttaataggtgtaaagaatttttatagaaatgctttacacctattttttatgatgaaattattttaaaatatctagtgcctatattgaagaaaagtaggtttgaaaatggaatgaactttgtataaatttgtaactttgaaatttctaaatgcttaagtataatattatttattaaggtagtagtgaggggaggcataaaatgaataaaaaagatactatgcacttaatttttataattgtaatttttattttattatggtatattgtggtagcagtaagtgagattaataaaaatattgaaagttgtagtaacaaattagattatttgtcacaagagcttatgagtactaagtcggatattagtaatactataaatgaagaaatgtcaaaaagttatataacaaaaagtattgacttaaaagtaaaaaaaatcgagaaaaaagaatgtactattgatgtagatgttcaattaagtaaacttggaaaaaatggaaaagtattttttatgtataaagaagatagtgataaatggaatgaaactgagatgacaaaacatggggaattatcatatgcatgtgaaataaagataaatacaggaagtgaatatgattataaagtagttacaagtggagatatatctgaaagttctgatgtacaaaaactgactaaatctgattatatgcctgaacaacctatatttaattctgggataagagataatagagaatactttattgaaatagtagaaaatagtaatctttttaatcatgagagtgaaaagtcaaaaaataaagcttacgataatatcaggttagaaaaagtagatattattgtaaatgaaggaaaaaaagacactatatacaaagcccaattagctgaaggcttagatgatggcaaaactaataattcaaatagaaatcaagtgaattatgaagtaagttttcctaaaagggatattgatgacataatttatattaaagctaaacttacatacaataatggagtagaatatacaaaggatataactgaagatataactatgggattacaagatttagaaaaataaatacatatttaaataaatattcaaatagatttgttcacaaatagagtataaataaaactgtagtagttttacttatactctattaaaaaattataattttaattccatatatctagccccttcaattggattataagtataaagttctatatcataaaaaccaaacttttcatataatccttgtgcacttttcatgcttggaagagtatctaatctcatgtgtgtatatccaatttttttagcttctacaatgatttcttccaatagtatttttcctatttttaatcctctaaattgatttcttacatataatctttttaattcacatattttaccttcaagtttttttaaagcaacacaacctgccaaattttcatcaacaaatgccaatatcaatgagcctgaaggttttttatattttcctggaagtgtttttaattcattattaaagtcttgaaaacataagtctatatttagagaatttgaatattcagtaaatagaagttttacgttttcaagattttctaaatctttttcttcaacaaattgtaaagttatattttgagccattttatccgccattatataaacatgtttatataatgacttcacctccttgatatatgtatatttttcttaatatcaattagattttaataccattactttttcaccaccatagtcaagctctccattaaacttaaatccaaaatctttataaagcttaatagccattttattgtcttcgaatatactaagatatagttcatcacagttatattcatttttaagatgatttacaagaaaatctaatgatgcttttccacatcctttaccttgatattttgaatcaatcataaatctatcaagccaaactctatcatcttctaaacgaccatacatagcaaatcctattaaagaattttcatcatatattccaacaggtacccaagctgttataaatttagattcagcaatagaaagtgcattgctttctatgtaatctaactgacttttatctacagacaaactaactaaatcgtgccaattatttatgtctgcaattcttacatttaatttcaagatattaccgtccttcaaactttttgttacaatctaatactatcatattatgtattaaaaatcacttattaagattttaaataaactttttgaatgaataaattctcaggaaaaaggaattataaatacataataatacagcataggagtagatggatatatgaacaaaataaataaaaatttcaaaaatatttggataatattaggagctgtatcgatttttaccatggttataatttttaataaaaattgtaatgttaataaagagactcaaatagaagcttttacaattaagaatcatgataaaaaatttgtatatcctatgggaaatataattggagtaaaagcaaatacagatggtgtattggtcttaggatatgaggaagaggatgtaggctatattggaggcatacaaataggtgataatatagtaaaaatagataataaaaggataaaaaatagtcaagatgtatcagagattttgaataagattaaaaaaagtaaagttgaagtgacttttgagagaaaaaataagtataaaacagaagtaatagagactaaaaaagaaaatggcaagtataaacttggattatgggtaagagataaaatatctggaattggaactatgactttttacgaccctagtatggaaaagttcaaagcaatcggtcatgccataaaagattcggatactaatgaactattaaagataaagcaaggctatatatataagccagaacaattaaaaatagtaaaagctagtaatgaaaaagtaggtaaaataaaaggagattttaatgacagcaatttaatgggtaatttctcaaataattcagagctaggtataagtggtaatattacagaaaaccataataaagagtttaatgtagcaaataaagaaaagcaattaatagaagttggaagaccgcaagatgtaaaaataggagatgcagtaattctttttgaggataaaaacaaaaatataacaagctatgatataaaaatagaaagtatagtatatgataaaggaaattatagagatatggtaataaaagtagtagatgacaagttattggaatacacaggaggtatcgtacaggggatgagtggagctccaataatacaaaataataaaattattggtgcaataactcatgtttttagagataatccgaaaaaaggatatggtatttttatagatgaaatgataaaattgtaggtgaggcattaaaaaattttattattttatcaattatctaggaggaatataattttggagtgtcgaatatgctttagagtagataattaggaagcaattgtgtaaaaagtttagttttctgtaataagaagatgttttttaatggggggatttttagtggaaaaaatcaaaatagttttagcagatgacaataaggatttttgtcaggtattaaaagagtatttgtctaatgaagatgatatcgatatattaggcatagctaaggatggaattgaagcattagacttagtaaaaaagacacaaccggacttattaatactagatgtaataatgccacatctagatggattaggtgtaattgaaaaattgaatactatggatatacctaaaatgccaaaaataatagtactatcagcagtaggtcaagataagataactcaaagcgcaataaatctaggagcagattactacatagtaaagccatttgattttgttgtgtttataaacagaattagagagctagtttctaatagagttacacaagttgagccaaaacctagaccagttcaagagactcaaatgactagaagtgattttgttaagaatgtaggaaatatagagacagaaatcacaaatataatacatgaaataggagtaccagctcatataaaaggatatttatatttaagagaagcaataaaaatggttattgataatgttgagcttttaggtgcagtaacaaaagagttatatccaagtatagctaaaaaattcaatacaacaccaagtagagttgaaagagcaataagacatgcaatagaggttgcatggagtagaggaaaagttgacacaataaatcaattatttggatatacggtacacaatactaaaggaaaaccaactaattcagaatttatagcaatgattgctgataaattaagactagaacatagtatggttaaataaacaagacataaaaagtaaggctttttaattaaggcattggctataaatgcgtattacaagcagcgaaacggtataaccactagggttataccgtttcgctattttaataaatataaaaattttctttattatttgcttactatatcaatataataattttattatactatggatatagtatgtgtctttacaagttgtaaactgacagtggtttattttttaatataaatattgactttgatgcaggtaaactttgtatttttaagcgtattatggaatatgttaaataaaaaaatgatgaaatatagtattgtaaatgccaaagatgcaaaacaaacttaaaacatttattttattgttaagtaatgctataatataatgtgattttaataatgatagtggaggtttaaatatgagagtcgaggcccctataaaagtagatcgaaaaaccaaaaaacttgctaaaagagttgaaagtggggaaatagcagttataaatcatatagacatagatgaagttgctgcaaactctttagtagaagctaaaataaaacttgtcataaatgcggctccttctataagtggtaggtatcccaataaaggtccagggatattaactgaaaataatatactaataattgataatgttggagaagagttatttgaagaattaaaagaaggagaaactatagaagttgtagatggaaagatatatagaaaaggaaaatttttaggtgcaggagaagttttagacaagtatgaggtttcacaccaaataaaggctgcctatgagaatttagctgtagaattggatagatttatagataatactatagattatgctaaaaaagaaaaaggatttatacttggagaagtagaaattccaaaagtgaaaactaattatgctaataaacatgtattgatagttgtaagaggtcaggactacaaagaagatttaagtactatgctttcttatatagaagaggtaaagccagtattggttggtgttgatggaggagcagacgctttaattgagtttggatatactccagatgtgattgtaggtgatatggatagtgtaagtgatgaagctttaaaaaaggctagtgaaatagtagtacatgcttatacagatggaagagcaccaggtcttaagagggttgaggaattaggcttagatgcagttgtatttcctgcgccaggaactagtgaagatatagctatgcttatcgcctatgagtataaggctgagttaatagtagcagttggtacacattcaaatatgattgattttcttgaaaaaggaagaaaaggtatggcaagtacttttttagttagactaaaaataggttcaaagcttatagatgctaaaggcgttaatttgttatacagaagtaaattaaaaataaagtacatatgggcattaatagcaacagcattatttcctgtgttggtagttgcatcattgtcaccaggagttcaacagttcatacaactaatgcaattaaagtttagagtattattacagatgtaaattttaggaggataaatatgcatattaatatgaaatattatatagtcactataggggctatatttatagctttgggtataggcatgttagtaggatttaatttaaataataatcaacaattaagtgaacaacaagcaaacataataaatgatttggatgataagtttaatatcttaaaagaaaaaaatgataaacttgacagtgacttagcaagtgtaaatagagattatgaagaggcagttaattttataaataaaaatgtagataagattttagctggttcgctgaatggtaaaagtataggaataatatcggctaatgaaaatgacgattatacaaaaaatatagaagacataataaataaatctaatggaagtattgcatttaatatagtattaaaagaaaatataacaaatccagaaaagttaaaggaaatgtcaactaaactaggtacagatgtaaaaaatgcaaatgatgcagttaattatataattgacacccttaaaaaggaagatgcaagtgacattttaacatatcttcaagaactagatgtaataaagtttaactctcttggaaatacatatctaaaatatgattctgttgtaatagctggtggaaatgatgcaaaagacagtacaaaacagtttgaaaaaatagaaaaatttgtagtttcaaaacttaaatcagagaataaatatttagtagaagttcaaaatacaggagttaaaacttcttatgtagaactatattctaaaaacaaagttgcaactatagacaatattgatgaaggtataggaagtatatctctagctattcttctacaacaaggtaatatagttggtaattttggtagattggatactgcaacttcattgttgccatctattaaatagaaataattttaaggagagaaaaaatggattcttatataagtataataataccagcttataatgaagaaagtagaataaaatatacattagaaagcatattggacattaagcaaataaatgaaataatagttgtggatgatggttcaattgacaatactgctaaggttgtatctgagctagaaaatgaaaagattaaattttttaagttagataaaaatagaggtaaaggatatgctttaaattatggtatcaaattagcaatgaaaaatgcagatattataggttttctggatggagatttaggaagctctgctaaagaagttgaaaaattaatagtacctatattaaatggtgaggcggatgttacaatagccaagtttcctcctgcaaagagaaaaggaggtttgggatttgtaaaaggtttagctaaaaattctgtgtttgagatgactggtgttgagttagatgcaactttatcaggtcaaagaatatttaaaagagaagttttagaaaagtttgatgaaataccttttggatatggagtagaagttggaatgaccattgatatattaaagtatggatttaaaattaaagaagtattagtaaatatgactcataatgaaacaggaagaaatttaaaaggttttattcatagagggaaacagtattatcacataaaaaaggttttaggacaaaaaaagaaagaatggaggtaatatcttagtgaaagattatatactttataccattttattattaactggattatttggaacctatgctgtaattccactatttaaaaatttattgataaatggaaatgtacttagaccaaactataaaaaagatatgataccagtaagtatgggaattgtatttttgcctatgattgtaatcaatggaataatacttgctttctttactacagaatttaaggatttagcgtatatatttatgtttatgtttggtatgatatccatgttttttgcagggatactagatgatgtcattggaaatagagatgtaagtggtttaaaggggcattttaaaagtttatttaaaggaagtcttacaacaggaggttttaaagctttatttggtggatttgtagggcttatagtttctgttgctatatcaaaagacataattgatataatagtaaatacactaataatagctctatcaactaatttaatgaatcttttggatttaagaccaggaagggcaataaaagcatatttattcataatggtaattatatttttaacattgacaggatttgttcaagttcttccattacttatagtaccaaatgtacttgcatactttaattatgatttaaaagcaagggctatgatgggagatactggttcaaacgtccttggaatatctattggaatgctcatttcttttgggtatccatttaacattagattaggatggttaatatttgtagttattatgcatatattcactgagaaatactcattaactaagataatagaaaaaaataaactattaaattttatagataaattgggaaggtagtattatgataagcaaaagagtggggattgttgaatcaatagtaagtcaaactgaaactctagatgatataagagtaaatataaatggaaaaatacaaagggcatataattatcccaaaatatctggaactataaatataggtgatgaagtggttttaaatacaacagcagtagaactgagcttaggtacaggtggataccattttgtaataactaatttaaataatatagaatctactttaactgaaggtgggcatataatgaaacttagatatacacctcttcaaataaaagtggattctgttgaggaacaagaaagtatttatcatgataaatttgcgaattttaaaggattagaaggtctttctgttgtagtagggactcttcatagtatgttaactccatttgcagcttcatttaaaagaaataatccaaataaaaaattagtatatataatgactgatggagcatctcttccaatttatttaagtaaaaatgtggacactttaaaagaaaaaaaattaatagatagtacgataactataggaaatgcgtttggtggagattatgaatgtataaatatatatactgcattaattacagcaaaagaaatactaaaagcggatgcagtatttgtcagtatgggacctggaattgctgggacaggaacaaaatatggatttacagggattgaacaaggctctattcttgatgccgtaaaaaaacttgaaggaagagcaattgcaattccaagaattagttttgctgacaaacgagaaagacatcaaggtatttcacatcatagtatgactgtatttaaagaaattgtaaatgtaaatgtagacataccaataactatatatgatgatgaaaaattgaactttataaaagagcaaatcaatttaaatggtttagacaaaaagcataatataatttatatagataataataaaacgaaagaggatttagactattttaatctaaaagtaaagagtatgggaagaaattatgaacaagatgaggcatttttcaaagctgcaagcacagcagcatattacttaatggaggtttaagatggtattagaagaaaaaactattagtagtgatagggtttatacaggtaaagtaattactttaaaggttgatactgttgaaattccagggcaaggatatcaaaaaagggagttagtagaagttggtggagcagtaggaatagttgcaatcacagatgataataaagttgtactagttaagcaatttagaaaacctatagaaaagccaatctttgaaattccagctggtaaactagaaaaaaatgaaagtccaaaagaatgtgctgaaagagaattaaaagaagaaactgggtatagtgcaaaaaatattaagctaatacataaatttttcacttcagcaggtttttctaatgagataatgtttgtatatttagcaacaggtcttactccaggagagaataatttagatgcagatgagtttttagatgtctatgaaattgagcttgaagaagcatataacatggtattaaaaaatgacgttgaagatgcaaaaacatctattggattattattagtaaaagatatgtttaaaaattaatatttataaaatgaataaccctttgtcctaaagcatattattttataaaggacaagggggaattaaattgagaagaacatatagaaaaaatgattttagagaattaaatagacaaataattattataggattgttgtttatgatgtctattgttgttgggtcttacataaataaaatattgccaggttctagtaacaatatattaaacaatataaatcctgctgtagagtattataatctaaatataagcataaaagatacagtgatacaaaatttaaaatcagatgcaatctttatgggctcaatagctctattaagtctatttgtagtaacaattccagcagtgttggtagcttttgtattaaaagggatgtcaattggttatacaataaatagttgtatattggcattaaaatttaaaagtataaaaatgattttaataatattatttaaaaatttgattattattccatgtgcaatcatattagcattaattagtttaagttattttaaagaaatggtttatgaatttaaaaagaaaaatagaaaaaatatgcaatttttaattaagaggtatatactaaatattataattataatagcactatcattggggttgcaattaatattaaatactgtaagtattggtattattaagttcctagctaaataaaggagtttataatggatattatagagggatatatagattacataaaagataaaaaaaaattatcagagaacacagtggcatcatactttatggatataaaaaaatatatggaatatataaatcaaaaaagcattaaactagtagatatagtagaaaatgatattataagttacttaataaagttggaaaaagataatgtatcaatagctacaatagcgaggatgatatcctctataaaatcttttcatgattatttatttttaaatcatatatgtacaaataatcctgcaaaggatataaaaaaacctaaaataaaaaaagaaaatataaatatacttacagaagaagaaattgaaagactattaaattttccaaagttaacaacacctaaattgattagggacaaggctatttttgaagtattatatggtactggtataaaagtatctgaattagtagagatgaatatagaggatattgacctagatattgattatatatattgtaattcatgttgtaaaaatcaaagagtgataccactttgtgatattacaaaactttacttagaaaagtatctaaaagaagcaagacctaaaatggctgtagaaggtgaaaaatcattattcgtaagttcattaggtcaaaggtttacacgacaaggtctttggaaagtcataaaaaaatattctaatctagccaatatagataaaaatataaatcctacaatgcttagacattcatttgctattcatttgttaaatgaaggtgctaacattgctgttgtaagtaaaattttaggaaatgttaatttatctagtttgcaagtatatttaaatcatatagataaaaacgtgagaagagaaataaaggaaaaacatcctagaaatgatgttgatgtagaattacaaaaagcagaagctaaatagactatatagcaaattttataatttaaaaggagtatatttatatgagcagagtaatttggattgtaattgatagtgttgggataggagcattacctgatgctgaaaaatttggtgatagtaaggatgtaagtacccttggaaatatatttaaggaatatccagatattcagattcctaatatgagaaatttaggtataggaaacatagatggtatagatttttttgaaagtataaaagaaccaataggttgttttggaaagtgtaaggaaatgtctcagggaaaagatactactacaggtcattgggaaatgactggtataatagttgacaaaccatttaagacatttgaacatggattctctaaggagataatagaagagtttgagaaaaaaactggaagaaaagtagtaggaaataaaccagcttcaggaactgtaataatagatgagtatggagagcatcaaataaaaactggagatgtaatagtatatacatcagctgatagtgtatttcagattgctgctaatgaagaagtaattcccctagaagaactctataatatgtgcaaaatcgctagggaaataatgatgggggataatgcagtagctagagtaattgctagaccattcataggtaagaaaaaaggtgagtttgtgaggacttcaaatagaagagattattcactagacccatttgaaccaacagttcttgataatataaaagaatcaggacttgatgttttagcagttggaaaaatagaagatatttttaatggaaaaggaattacagatgctatccacactaaaagcaatatggatggagtggatgaaactttaaattatatgaaacaagataataaaggtctaatatattcaaatctcgttgattttgattctaaatatggtcatagaagagacccagaaggatataagaaagctcttgaagagtttgatagtagacttcctgaaataatggctaatatgagagaagatgatattttaataatcaatgcagaccatggaaatgacccaacatataaaggtacagaccatacaagagaatatatacctgttatgatttatggcaataagattaaaaaaggttttaatttaggagtaaaagatacttttgctgatattggagcaactgttgcagatatactaaatgtaaagttgcctaaacatgggtcaagctttaaagaagatttattttaaactataaaatgataaaaacttagcttaataggatggagagattggaatgtttgaaaagatagcacaaagtagtaaatttataaattctaaaagtaatataaaacctaagattggtttgatattaggttctggactaggtgatttagcaaatgatatagaagaccctgtcacaattaaatatagtgaaattccaaacttccctgtatcaacagtagcaggacatgctggacaacttgtaattggaaaacttgaaggaaaagaagttattgctatgcaaggtagatttcattactatgaaggatattctcagaaagaagctacttttccagtaagggttatgaaagaattaggagtcgagattcttatagtaactaacgctgctggaggcgtaaataaagaatttaaagcaggagatttgatgcttataagagaccatataaactttagtggaagtaatccattagtaggaaaaaatgatgacagatttggtgctagatttccagatatgtcagatgcatattcttctaaatatgtagatgtagttaaaaactgcgctaaagaatgtaatatagatgtcaaagaaggcgtttatatgttttttagtggtccaaactatgaaacaccagcagaagtgagaatggcacaaattttgggagctgatgctgtaggtatgtctactgttccagaagtcatagtagcttctcactccaatataggagttattggtatatcttgtataacaaatatggctgctggcatcttaaatcaaccactaagtcatgaggaagtaatagaaactactcaaaaagttaaatcagaatttatgaatttagttaaaacaacggttaaaaatttataagttaaagcttattatatattttttgaggaagtttataataaaatagttaatgtttaatttgaaaagaattaataaaaagctgtcttgatatagaaagttatttctaataaaggacagtttttttataatactacaacatttgaaagtgttttaaagtttaatatttatttaaattattatagattagaatggagatttcaattatgagaatgtatgatattataaaaaaaaagagagataacttagagcttagtaaaaaagagataaactactttatagaaaactattcaaagggagatatacctgactatcaagcttctgcactattaatgtcgatttatttaaataagatgaataaacaggaaactgtacatcttacagaagcaatgatgaactctggagacatgataaacctgtctgaggtagatggaataaaggtagataagcatagtactggtggtgttggagataagactaccatagctcttatacctttggttgcttcatgtggagcaccagttgcaaagatgtcaggtagaggtcttggtcatactggtggtactattgataaattggagtctataccaggtttttcgacagaaatggagataagtaaatttattgattctgtaaataagtctaaaatagcagtttgtggtcaaagtgcaaaggtagcaattgcagataagaaaatatatgctcttagagatgttacagcaactgttgataatatatcattgatatcatcaagtgtaatgtctaaaaagttagcttcaggagctgatgcaattgtgttagatgtaaaaactggtgatggagcatttatgaagacattagaagagtcttttgagttagctaaatctatggttgatataggtactggtatgaatagagatacaatagggattgtaacagatatggatgaacctttaggttttgcagtgggaaactctttagaagttatagaagcaattgagacattaaaaggaaatggccctaaagaccttgttgagctatgtgaagtattaggagcatatatgttggttttatcaaaggtagcacatgattttgaagatggtgttgaaaagataagagaatcaataaaatctggtactgctatacaaaaactcaaagagtttatagagaatcaaggtggtaataaagatgtagtagatgattattctttattcaaaaaatcaaagtataaatatccagttaaatcaattaaatcaggttatataagtaaaattaaagctgaagatgttggtgtatcagctatgattcttggagcaggtagagaaactaaagatgatattttagatttatcagcagggataattttagaaaagaaagtaggagattatgtaaatgaaggtgaagttttagcttacatgtattataatgatgaacaaaagctttcattggcaaagggaagatttattgattcctactctattgtagattcaaaaatagaaaaaaataaattaatatatggtattgtaactaaagaagagattaaaaagttttagaaaattttagaaaagtgattataaaaggcctaacatgtcaaaaataatgttaggttttttattttttgataaactataaattataccaaaaatatatattttaaaacattttttacaatataaataagtttattctacaagatgattgaaaattaaagtatctagttttataatagaaaatggataaatatacataaggagtagattatattatgaactttaaagaaaatagattgaaaatagcagtattaataattgttattttgattatcttagcaggtatatttgtgtttatacaaataggtccttatgataaaaataacaaaaaagatgtaattattgacgttccaagtggagcatctgttggaaaaatatctgacatattatatgaaaataaattaataaagaatgaactattatttaaacttttggtaaaggttagcaataaagctccgtctataaaatcaggaacatacttacttaatcaatcgtattcaaacaatgatataataagtcttttagtttcaggtaaaatatatcaggatggtataaaagtgactattccagagggagctacatctaaagaaattatagcaatgttagtaagtaaaaatttaggagataaagctacttttgaaaatttaataaaaaaacctcaagaattttatgataaatttccatatttgaaggaagatggaataacctctttagaagggttcttgtatccagaaacttattattttaattcaaagaaacaatcagaagaagatattttaagcgaaatgttaaaagtatttgacagtaaatacacggacaagtttaaaaagaaacaaaaagaattaaatatgactcttcaagaagtaatggaaatggcatcaataattgagaaagaagctgttcttgacaaagacagacctataatagcaagtgtgttttataatagacttaaggtaggtatgcctcttcaatcagatgctacaatacaatatatatttgaagagagaaagaaaattgtaacatatgatgatttaaaaattgattcaccatataatagttataaaaataagggattacctcctacaccaatatcaaatcctggtataaaatctattgaagcagcattatatccagagaaaacagactatttatattttgtagctaagattgatggtggaaataattatagtacaaactatcaagaccatttaaaatacgttaaagaatataaagaagcaagggataaacaatcaaaagatacaaaagcaacaaataaagaaaatacaaaaaaataaaccatgattataaaaagtctaacagggtaagaataatgttgggcttttttattgaaaattgttattcttagatttataataaagaaagtgtaaatatatataacaatatgaatttaaaaaataataaattaatataaaacttgaatatttattattttagggagtgtttttatgagtaatatagttaatgatttggttgaagattatataagagtgacattaaaagaaaaagaaggatttttaaaagatttagaaatttatgcagaggaaaatagtgttcctataatacataaagaagtttcagatttattaaaagtcttgttaaaggttcaaaaaccaaagagaattttagaagtaggatgtgcaattggttattcttctattttttttgcaagtattataggaaaagatgcagatataataactgttgagagaaatgaaaaaatgatagaaaaagcaaaagaaaacataaaattagctggatttgacaataacataactatactagaaggagatgcagaagaaaaacttagtcaagtccaaggtgaatttgaccttatatttatagatgcagccaaaggtcaatataagctattttttgatttagttatagataaattaaaagatgggggacttttagtatctgataatattttgtataaaggtatggttgctcatgatgattttgttgtaagaagaaaaaagactatagttaaaagaatgagaaattatttagattatatatgtaattgtgactatttaagcacatcattggtaccaataggtgatggtgtagcactaagttataaagaaagtaaaagaggtgatgtagatggaattaaataaagtagaacttttagctccagcaggtgatttggagagattgaaaatagctataacatatggagcagatgccgtttatataggtggagaaatttttggaatgaggtctgcagcgaagaattttagtaaggaagatatggcagagggagtagcttttgcacatgaaagaggcaagaaagtattcgtaacagtaaatataatacctcataatgaagattttctacaattagaagactatttgttggaactagaagagataggaatagatgcagttataatagctgacccaggagtgcttagtgtcattaaaaaagtaattccgaatatggaaatacatttaagtacacaagcaaatacaaccaattatctaagtgcaaacttctggtacgagcatggaataaaaagagttgtagtggcaagagaattatcttttgatgaaatatctgagataagagcaaaaacacctttagatatggatatagaagcgtttatgcatggtgctatgtgtatttcttattctggtagatgtttaataagcaactatatgactggaagagatgcaaacaaaggttcttgtgctcaatcttgtagatggcaatatcatttggtggaagaaaaaagacctggtgagtattttccaatatacgaagatgaaaggggtacattcttctttaactcaaaagatttatgtatgatagagtatataccagagttaatcaaatctggtataacaagtttaaaaatagaaggtagaatgaagactgcatactatgtagctactgttgtaagagcatacagaatggcaatagatgaattttacagagccccagaaaactggaagttcaatccaatgtggatggaagaactaaaaaaaggtagtcatagacattttacatcaggtttttacttgaataaaccaacaacagaagaccaaaattatcaatcagcatcatatgttagaaactatgattttataggtatagttagagaaacagaagatgaagatggtcttattgttgttgagcaaagaaataaaatgtgtgttggtgatgaaatagaagttatgggaccatataaagaaactatgtttactaaaattgaagaaatgtacaatgaagaaggagaagctatagaatcagctcctcatcctagacaaatagtgaagttaaagctatcagtaaaagttggtaaagattatatgcttagaaaagttatagaagaaaaggttgaagaataataaaaaattgataaaaatagtattagccccttagaaattgtcaataatgaaattatctaaggggtgatttcatgtcaaaaaagaagactccatttttgaaaaaagtgggaaagagaagctggtgtatatttactataattttaataatttatagtgttttaatttataggctagttgatatacaagtattaaaaggtgataaatacaaacaaagtgttgaatcacaaagcgttgagaaagtcgagttaaatagtggaagaggaataatctatgatagaaacaacaagaagcttacagatacaagtaaatctcaggtattaattgttgaaaaagaaaaattaaataataactataaaattttggaacttattaagaaagctactaagatgaatgatttagatatatataaagctgtacaagagcaattgacacgccctataatacagattcagactaaaaatatcgataagagtatgaaaaaagaacttgagaaaaatggaataatggtagaagaaaaaactatgaggtacgcaaaagatggtttattatcacatacaataggatatataaaagaagatgataaatcaggtcaatcaggaattgaaaagagtatggatagtgtacttagaaattcaaatgaaaagtatataagtgcttttaaagctggagatgcaggaaatgaaaaatctctaaacatactaaagggaagtgtaaaaactgttgataataaggataaagatagacatctaaaaactactattgattataacattcaaaaaaaattagaacaaatactaaataaagaagaaaatcctacagcagcaataatctcggaagcatctacaggtgaaattcttgcaatgtgctctagacctaattttgaccaaaatgacatatcaaaaagtttaaaaggaaaaaatggggaatttgaaaatagagttataaaagcgacatatccaccagggtctgtatttaagatggtagttttattttctgcacttgaaaatggtgttatagatgagaactatacttacaactgtacaggtaagactaaagttgggaatactaatgaaatactgcgatgtaataaaagagatggtcatggtttccaaaacttaagacaagctttttctaattcatgcaatcctgcatttttagatatagctatgaaacttggaaaagaaaagatactcaaatctgctgaaaaattacatttatttgaaaaggttgatattggtcttgatgaagaaaaaattagagaagctccaaaaaacatatcaataagaaatttagctataggtcaagaaaatatagaatttacaccacttcaaataaatcaaatgactcaaataatagctaataatggaacattcaaaccactatacttatataaaagtcttgtggacaataatatgaatacaataaaaacttataagtcttcaaaaaaagaagaacttatttctccttatgtgtgtacacaagttaaagaatatatgaagtctgtatctaggattggtacagctaaagacctaaaagatattgaaggtggttgtggagttaaaactggtacagctcaaagtagtttaaataaaaaagctatagaccacggatggataacaggattttatcctgaagaaagacctaagtatgtaataactgtgttagtagaaggaactcaaaaaggaaataaatctgcaacacctatatttaaggaaatatgtgaaagtataaaataaattatgtactataaaatttaaggatatatcgtaactttgattttagatagaaaactttgtctaatgatgtacgatatatccttttaaaatatagtattaactttcttgaacaagctctttttctagttttttaagagcttttttttcgattctagatacatatgaccttgatatatcgagtttttgtgcaatttctctttgtgtcttatagccataaggagttaacccatatcttaactggacaatttctctttctctaggagtaagaattttgtttagttgttcgtaaagttttccaacttgaacttttagttcaacttcatcaagaacatagttagcctctgtgccaagtatatctaaaagacttatttcattacacactactctttatatgttattggtattactggtcttcatgtaatttcaaatggaccattaattcaaaagaatctagtttttgttctttagacttataataaaccgctttatcaattacagattttaggagtttattttttccaagggaatctgaatcatggtaaagtgataacacagttttaatatcttctattattttagaattgtcttttttaacagtactcaatctattttttactgtcttaattgaatctttaatttcttcagttcttgaacttatattgttggacctttcaataaatgtatcttcatcatatattcctcgttctagtaaatcatataacttatttttttgcttgcctaattcttttaactcagtttctaagccctttaagactcgtttttgaaattctatattactatctttattatttttatctaaatctaaatcagatgattttaattgatatttttttacagtgtcttccaaagattttaaaatggcagcttcaataaattcaaatcgagaacttttattgcaaccaggatggtaacaaattatatagtcgtggtctgcatatggtctatatactaatggtctaccacaatttttgcaaatcactattcctgcaagtggattttttatttgattaccatagctgacatgaccattttttttgagtatattttgagcttttttccatgttatttcacttattaaaggttcatgctttccttttgcttcaatccattcatctttaggtcttagtttaactgtttttattttatttggatttttagattttttgtagtcctttttttgccactgaatgtagccacaatataccttattttttattatatttgtaattgcagaattgtaccaattagcacctgtagcagttttaatgcctaagttatttaggtattttgatattttactacaacccatatcttcattaatatataagtcaaagatagtcctaactacatcagcatctttatttggtacaagtattctttcttttctaccagttgttacagcatcatatccaaatggagcagaggttcctatgaaattcccttcttcaactgattttattctacctctttgcatccttcttgatataagttttaattcttttcttgccataaatgcttcaaattctgaatactcctcatcaaattcatctgttaggtcgtatgtttttctaggtgtgatgattttggttttactttctttgaatgtttctaatatgataccttggtctttcatgtctccacgaccaagtctgtctaagtccattactaagactgcatcatatttattttcttcaacttcttttagaagttcaagcattttgggtctatgtattatactttcaccagaaactaattcttcttttatttcaattacatctaagttttgttcttttgctagttttagtagggttgatttatgtctacttaaagtttcaaattcgccttgtttttctgcctcttcatcagcacgggattttcttaagtatatagcaacactcatatagataatcacactccttatgcactattatatattataatttggagttttaataatatttttataaaaataagtacatttttatatgtacttatattaattataatagaatttaaacaagtgtttttaattatataatttaccataatatgttataatatttttagcaagaataataatctaaagtggcaagcatgtcagctggtgttatatcagtttatatttatgataaaataaaaatctcccaaacgccaataaggatgatttaaaaaaataatattttcacttaaaaataatcactttttataggagtaaattattttcttgattttattgtactacaaattggtacagatatttaaaaataatatattcataatattataaatagttttgcagtgagcgatatttttgataaaataggggttaacagttgaaacataaggcattgagggtatatgataaatattatcatttgcactactcgtggttcactgcaaatttgagagaattgtatagatgtaagtgttggaaatactcaatttattttggggttttatattaactaagtggaatgtaaatttgtttcccacagatgtaatgacaaatatatctcctagttttatattaactaagtggaatgtaaatttgcgcatgaaataagaacatctaaagacaaaatatagttttatattaactaagtggaatgtaaatatattttcttttgtactttgagatttaagtcttaatcgttttagattaactatatggaatgtaaatcatacacttttttaaatgcagcactaccaaagcgatggttttagattaactatatggaatgtaaatattgcaatgcttcatcaactattacacatagtatcttgttttacattaactaagtggtatgtaaatattttattagcttgtcattttatagattaagggttgagttttatattgactatgtgtacaagaatagagtagtttgaactactctattttttatttaaaagtatattttacattaattttcttcttcttaactcttcttcacaataatatcgacacaattctaaaaaatctatttctaaagcaagtgataaatctatgattgtagaaatattaatatttttgtatctcttattttccaaatcagaaatatatgctctactataattcgctttttctgctaattcgttttgagtcatacctctttcttttcttagtttttttagcatatataaaatctccttttatcaaattttatataagataatatttgtagaattataaaatatatgatggtattagcgtcattattttatggaaatttatggtagaatatagttaagaatattaagaaaatttattttgaaggtctataaataccgaccaaataatttgtaaaaacaatgtaaaaataatgtgaaaaattgtaagaaaaaaatcaaaaataaaatgatttatttttagaaaatcatgtttagtcatttttagcgttatacaacattaatgtttattaacgagtattaaatagtactagtttatttaaaatcaaaactaaaatgaagaggtgtagagtttttttgtgggttgcaggaatttttggaagtctatataatatatttacaaagtaattcttagaaagttagtaaaaatatatttgttgaaataaatttactagagttgtaaatggggggattttcatacctatttttacgaacgtaagttcttaaaatcttaatatttattaattttagatgaaaataggagatataaagcgtttaaagaagataagagaataaaaaataaatatatagggagatgctttaagtgaaaatataaataatgtactaaatttatacaaataaggaaataacatatagtgtatttaaaaataaaaaggctggtggtgtttaatttgaagtatttttaagtgtatatttataatataaggggaatttttatatttatgaatggaggaatgtagtaatggatgaagaaagaaaaaaattaattgatgatgcagaaaaactagcaaacataggaataaatcaaattttaaagtttagagattcattagatatagaaaatataaaatatataaatatagttgcaacaaatttaaagccaaacataaaaaaatagccacccttttgggtggttttattgtgtcatatttttcattaagtttatgagaaattctttttgctcatcacttaatttgctaaaagtaaataatatatttttcataaacttatcgtcttcatttataatgtcagttgctatttttagaactttttcattttcagagaactctataaacatttctcctttaccagtttctaaccattctttattaacattatatatgtcgcaaatatcagagataacacgctctgtaggatttactttaccagtttcaatgtttccataatttgagcgacttatttttattgatttagctacttcttcttgtgtatgtcctaaagtttttcgcaattctattaatctttttattttttctttttcctccatgtttacatatcgcctcttttctttaataagataataacattaaatattaatgtttgcaacaagcaaatttattttttaaaatgcttgacacggtatataaaaagagatacaatgattgtaacaagcaaggaggtgctgaaatgaaaacacaaaaaactactcatcatttaaataatttaaatttggatgatgatgatagaaagcttattcaaatgactcttttgtttaaaaaattaaatttagaacaacaaaattatatctctgcaatggcagatggtatgaaagtatcaaatgagcttttagaaaaatcaactataaataattaagggggaaagaatttatgagtaataacttaatggtatttgaaggaaaagaagtagaagtgtttgagtttgaaggtcagattttatttaacccaaaacatgttgcagagtgcttagatataaaaaatgtaaatgaaaatttgagaaatatgaataataaacaagtaattaagttaactaattctaaaatcagtagtactgactttagaaaactacacaatacaggagaaaattttcttactgaaagtggtgtgtataagttaatctttaaatcaagaaaagaagaagcagagagatttcaagattgggttactgatgaagttttaccatcgataagaaaaacaggtacatacagcactaaatctaaagatgaatcagaaataaaatacatgaatgctcaagcaagattaaaaaatgcaagagcaagagaagcaaaaatatatctgaaattagctgacaaagtatcacaagctggtataccagaatttgctcaagtaatgtactcaaagactactgaacttatttctggagaagcattaatacctttacctaagagggagaaaaaaacttattcagctacagagataggtaagatattaggaatttcagctaataaagttggaggattagcaaatgcttataatctgaaaacagatgaatatggaattaaggtatgggataaagctaaatattcagataaacaagtacctaattttagatattatgagaatataataccagttttagaaaaagctttaaatgcttttgaaaactaaattgaactgtcttagatacggatattagaaaactaaatttaaggaggaataagaaaatgaaagaaaataatagaatagtgagtgctataaatgaggatatagtaggtattacagttgatggagagatagacttaacagataaggaattagaaatggtaaacaattttaagaaagttatgaatagcattaacaataaaataggtattgattctgggatttcacttagtgataacgagatagaaaataataaagatatgatatacaagattgcttcaaaagtggcatggcattataagaaaatgaactttgaacacttagaaatggatgaaaaactctttgatgattttacttttgagtttatgttaaagttctttggtgatatggaagaatatgaattaataaaatatcttacttatataggagaagaaagtaacgaattgagtgatagagaaaggatattttataaaatagtagatacacttgatacaatagctgatattaaaatatcagaccaaaataagatagaaaaaaaagttggtatgtgtataggtgaagataattatataacttattgtatagatgaagacttaataaaattttacattaaagatgaagaagaactagttataaataaaaatagccctctgctatatatgttagacacactattttatgaagtacatgaagagtaaaaattgcaataattaaataagtataagacaagtttatgagctcatattttataacaaggggtgatgttatgaaaatactacaacaatttaaaccatacaaatatgatgaagagaaaaacatagaatatgatgaaaaaattatagctaatcaaaacacagaagtttatatagtatatccacgtatatctgatgaagagaataggaggagatggaaagagtttgatgaagtagccaaagaagtagctattaatatagcaatgaagaaagctgagacagtagaaagttaagaaagtagagaagttgctaatacttagcactttctcaaagaagaaaattggacaactatttttaaacaactaggaataaataagcgatagtatgtttgaaagaaggtgatgaaattgcttagtcttgatattagtaagaaaaatgtgatgactcttaaaaaagatggtaagtttttagcagatatagtatttaaggacattaaaactggtaaaaaaatatcagttggaacattaaataaaaaaagtgctggtcaaagtaaccaacacaataaataaaaaaagttaataaaattataacataaaaaggagagatttaaaatggttgaagttaatataaaaattaaaggcgaagcaagtgaaataattgactcaattagagctatatttaatagctttggtgaagattcaatgacagagataaaagcagagcaagaatataaaagtagacgtagtagaaagttaaaaacagaagatttatcagaccaggaataaagaaggtgatataagttgcaactatataagcatcaagaggaagctttaaagctaacagaatataataataaatgtgcatactaccttgacatggggcttggtaaaacatttgtaggaagtgagaaattaataaatctaggaagtaatacaaatttattaatctgtcagaaatcaaaaattgacgattgggtacatcactttaaaacatattatccagatatggggataatcaatggtacaaagaaacttagtgaaggcatagagtattttaagattgttgaagttccatttatagtagtaattaattatgaattagcttttagaagaaaagagttattagatttaaaagattttactttaatgttagatgaatcatcaatgattcaaaatgaaaaagctaaaagaagtaagtttgtactaagtttaaaccctaaaaatgtgatactactttctggtactccatgtagtggaaaatatgagcaactatattctcaaattaaactactagggtggaatatatcaaaagatttatattggaagcaatatattgatgttgagtacaaagatattggtggttttccaatgaaggttgtaacaggttataagaatgttgacagattaaaaaagaagttaagagattatggagcagtatttatgatgtcagatgaagtatttgacttaccaaaacagatagataatgtaatgaaaattagtactacaagagagtataggaagtttaaaaaagattcaattataagtatttcagatgatattgaacttgtgggagatactacactaactaaaatgttatatgaaagacaattatgtagtcaatacaataaatttaaattagaagcttttggagacttaataaactcaacaagtgacagattaatagtattttacaattttaacgaagagttagacagattaatagaattatcaagagatagaccaatatcaatagtaaatggttctataaaagatttaagcaattatgaggaatataataactcaattacatttgtacaatatcaagcaggagctatgggtttaaatcttcaaaagtgtaataagattgtatattttagtcttactttatcttgtgaattgtttatgcaaagtaaaaagagagttcatagaataggtcaagaaaacacatgtttttattattatatgatttgtaggaatagtgttgaagaaaatatatataaaagcttacaaagtggtgttgactatacaaataatttgtttgagagaggagagtaatccttgggtgcagaaaaacaatttgaaaataaagttaaaaagtttttaaaagagcaaggttgttggtttattaaatattggggaggttcagcatatacaaaaagtggtataccagatttattagtttgttgtagtggtaaatttataggtattgaagtcaagggggaaaaaggaaaagcaagcgaactacaaaagtataatattaaagaaattgaaaaggcaggtggaataggaattattctataccctaaagactttgatagatttaaaaagatgattttagaaataaagaaagaaggtgagtaaatgcagttctcacatagtaggataggagtatttaagagttgcccatataagtataagttacaatatattgacaaggtgaaaacaatattaaatgcagattctaacaatgctttaatattaggaacatcacttcatactggtattgaaaaagatattgatgcagcagtaaaagaatattattttagttatccaagtataacagatttacacattaatgaagtgatgaagttagattatttaataccaaaagtaaaagaaattttaccaaaagggtttaatgaggttaaaataacaactagtgattttatagggtttatagatttgttaacaccacatgtatatatgactgatacaaacttaaatacaaatgaaacaaccatatattatgaagatgaagaaagagtatttgatatttatgactttaaatattcaaacaacatagatagatatttagaaagtgagcaacttcatctatataagtatttttatgaaaagcaacatccaaatcatgagataaaagatttgtactatgtatttgtacctaaaattcagattagacagaagaaaacagaaaacttacatcaatttagacaaagattacttaatgagcttgataaatctgaaataaaaatagtgaaggttgagtacgacccaaataaagttattaatttccttgtagatataaaaagatgtcttgaaaacaaggaatttgaaaaaaatcaaaataaattatgtaactggtgtgactaccaagaatactgtgaaaaggggattgattatatgttattaccaaatagtgaaagaagaagtgtggaaggaattaataaaaaaactttatggatttatggagcaccatttagtggcaaaactacattagcaaatgattttgaaaagcctttaatgcttaatacagatggaaatataaagtttgttgatgctccatacatttctataaaagatattgtaacagttgaagggagaatgacaaagagacaacttgcatgggatgtatttaaagaagctataagagaattagagaaaaaagaaaatgattttgaaacaataattgttgacttgttagaagatacatacgaagcttgtcgcctttacatgtatgacaagatgggaataactcatgagtcagatgatagttttagagcatgggataaggttagaacggagtttttaagcactataaaacgacttatgaaccttgactataaaaacataatattaatatcacatgaggatacatcaaaagatattaccaaaaaaggtggtgacaagataacagcaatcaaacctaatttacaagaaaaagcagcaaataaaatagcaggtatggttgatatagttgcaagagtagtagctgatggagacgttagaacattatcatttaagactaatgaagtgatatttggagggggtagattaaaagtaaaatctaatgaaattccacttgattataatgaattaatgaaagtatatgatgatattagtatagagaaaaaagacgttaagaagtcaagtaagactaaaaaatctaatgctgaggaagaagtagaaatgattcctatagcagaagaaataagtgagaaaactgaaaaagaacaaacagaggaagaagtaattgaacaagaagaagcaattaaaccagtcaagaaaactagaaaaaagagaagttagtttaagtgattatataagaaagatgattaattaaaaatttaaaagaaaaggatggtatgtgatatggattttagtaaatttgataaagcaatagatgtaaaaggattaaaagaagatataaaagaagcatctgaaaatagtggtaaatttaaagatgtgccgcatggcacttatgaagtagaaataaataaaatggagttaagtgaatctaaaaaaggtgacccaatgtttgtatgttggtttaaaatactagaaggagagtataaagattcattaatgttcatgaatcaagtagttaagcaaggttttcaaattcatatagtaaatgaatttttaagaagtttagaaactgatattgaagttgaatttgaatcatacagccaatatgcacaactcataatggatatagctgaggaaatagatggagagcttgaatttgctattgaatatggtgagaagaaaggttttaatacctttacaataaaagacatatttgaagtagcttagaaactttattacagctaggtgtatacatgcatctagctgtaatattaaaaaggtaggtaattaatatgagagtaaaaagaaaagatggaacttataagcccaggtaaaattgtaagatgtgtttggtgtggaaaaagattttacaagttagataactctaaagtcatatattgtagtagaaaatgtgcagcaaaagcgagaggggtgttctaaatgattttttatgattttgaagtattctcttatgactggttagttgtatttatagatgttctaaataaaaaagaagaagttattgtaaatgatatagataagttaaattcattttatatagagcatagagaagatatttttattggttacaacagtagacattatgaccaatatatttttaaaggactattatgtggatttaatgcaaaagaaataaatgattatattattgttaaaggtcaacctggttggaagttttcaaacttattaagaaacatacaaattaataactatgatgttatgactagttttcatggattaaaacaattagaaggttttcaaggtcatagtataaaagaatctaatgtatcatttaacattgatagaccattaactaatgatgaaatagaagaaactataaaatactgtagatatgatgtcgaacaaactatagatgtttttattgaaagaaaatccgaatttgaagcacatatgggattaattaaagcttttaaacttccagtatcatatattggtaaaactcaaacacaactaacagcaattatattagaagctacaaagaaagaacatgatgatgaatttgacttacaaataccagatactctaaaaattgagaaatataaggaagttttaagctggtataagaacccactaaatcatgactattctaaaaatctaaaaattaatatttctaatgtacctcacgtatttgcttggggtggtgttcatggagcaataccaaaatactatggtgaaggttattttttacatgtggatgttaattccttctatccaagtcttatgattagatataactatcattcaagaaatataaaaaatcctcaaaagtatgttgaaatttatgacaaaaacttacagttaaaaaaagaaaaatcacctctaagaccagcctacaaattggcagttaataaaacttatggaggaatgaaagataaaaacaataatttatatgacccaagacaggctaataatgtatgtgttagtggacagctgttattacttgatttaatagagaagttagaagggcattgtaaacttattcagagcaatacagatggattaattgtaaagttaaatacaatagatgattatgagttaatagatgatatatgttatgagtgggaacaaaggacaggcatgggtttaggttttgatgtatacactaaaatatttcaaaaggatgttaacaattatttagttataacagaagatggagaagttgaagcaaaaggattatatatcaaagatttaggaaatctagactatgatttaccaattataaataaagcacttaaaaattatatggtaaacaatacacctattgaagaaactataaataactgtaatgatttaatagagtttcaaaagatagtaaaaataagtagtaaatattcacatggtttatatagtccaactatagagggaaaaacaaaaaaagtatttattggcggtaagattttaaatgataaatgttttagagtatttgcttcaaaaaataaaaatgatggtggtatttataaagtcaaaaataaagaaaaaaatccagaaaaatttgctaatacaccagataaatgttttatagaaaatggaagtgttataggtaaaaaagtaccaaggaagctagataaaatttggtatatagatttagcaaatgaaagactcaaacagtttggagtattattaagtaattgaggtggtgattagtgagttttgacctatttaaaggatatatagttacaaataataaaaaggcagctgagaaatttaaaaatgtaaaaaagttaaaaacttatgaacagattaagaatttaccagagtttgcaggtgttttagcagaagaaactgtgttagttgatattgatgattttgaaagtagtgaaattctatacaaaatagtacaagatttaaagctaaaatgtagagtttacaagacaacacgaggtaagcattttctatttaaaaatactagtttagaaaagaatagaacaaaatgtagactagctataggtttaaattcagatataaaattaggatgtaaaaattcctattcaattttgaagttcaacaatattgaaagagaaattctatatgatagtaaagaaatacaagagataccagtgtatttagtaccaattaaaaatggaattgattttctaagtcttggagaaggtgatgggagaaatcaagcattatataactatattttaactctacagagtaatgattttactattgaggaaataagagaaacaataagagttattaataaatatgttttaaaaactccattacaagataatgagcttgaagtaattttgagagatgaatcttttcaaaagaagatattttttaattcaaaaggttcatttttatttgatgagtttgctaaatacataaaaaataataatcatgtaatcaagataaatgaccagttacatttatataaggatggtatttatgtagatggtcaagcaagaatagaagcagaaatgattaataatataagcaatttaaataaggctaagaggagtgaagtacttagttatttaaatttattaataagtgagaatacaagtatgtcagaagctaatttaatcgcttttaagaatggtatatataatatagttgatgattcttttatagaattttcaccagaatttatcataacaaataaagttaattggaattacaatccagtagcatattcaaagttagttgataaaactatgaataaattatcctgtggggattttgaaattagaatgttacttgaagaagtagtagggtactgcttttatagacgtaatgagcttagaaaagcttttatattaactggagataaagcaaatggtaaatctacttatctggatatgataaagacattattaggagatgaaaatacatcagcacttgatttaaaagagttgagtgatagatttaaaactgctgagttatttggaaaacttgctaatataggggatgatataggagatgaatttattgctaatcctgctatatttaaaaagttagtaagtggtgatagggtaaatgttgaaagaaaaggtcagaatccatttgattttaacaactatagtaagtttttattttcagctaataacatacctagaataaaagataagactggagcagtgcttgatagactaattattattccttttaatgctagcttctcagtaaatgataaggattttgacccttatataaagtacaaattaagagagcaagaagcaatagagtatttaataaacttagggttacaaggtttgaaaagggtattacaaaatagaaaatttacagtcccagataaggtcaagaaagaaatactagaatatgaagaagtcaataatcctattttaggattttttaaagaagttgataagatagaaaatgaatcaacaaaagaaatatataggaaatatcaagagtattgtatattaaatggattacagcctatatcaaacattgagttttcaagacaagtagtcaaaaagtttggatatgaagtaaaagataaaagaatacaaggtaagaaatataaagtatttactagagcagtcccgggatagtcccggatgtagtccctagatgtaatatagtaatttcaacgttgtcccggatgtccctagatgtttttgaccttttatatatttaactaaaaaatcatcaattttttgtgatgattttgctccctttatataaagaatatatatataatagtatgggactgaacaaaaattattgtctggatatattgaaatagctaggcttgaagcagtcccggatgtattttacatctgggactgggtttaattaagaagttatataatgtaaaaatatttaaaaaataagatagatttcattaataacctaataaaataattaaaaagaaaattctgttaatttgcaaggatgtgaaaatggagtgacagactatgaaaaattagaagaattgttaaattcatatagtaatttggatattgaaattagagaaatagagttaaaagtaagaggtagtagtttgagaggaatagagttaaatggaatgcctaaaggaaatgatgtttcttcaccaatcgaaaatgagttaatatatgttgaaagattggagaatgagaaaatatatctacaaattaaaaaagaatcaattaataatatgttaaatttattagatgattttgagaaaaatctaatagaactaaggtattttaaaaaattacaatataaacaaataagttatgaattaaatataagcgaattatatgtaggaaaaaagagaaaaaaagcactagataaaatacttccctttgctaaaaaatataatctaatatgaaagtcttgtttatgtccgattaatgaccgattaatgattgatttagtatagaaacatgtcacataaacatactatgagataagatataatggtagtatgaaacaagtgtataaatatatcccctaaaaaagactaagttatctcgacttggtcttttttatatttaaaacaaagtgaggtggtgatgtggctaaattaactgaaaaacaaaagcggttttgtgactattatattgagactggtaatgcaacagaagcagcaataagagcaggatatagtgaaaagacggctaaggtaataggtgctgagaacttaacaaaaccatacttaaaaagttacattgatgaaaaactaaaagaatttgagtcaaacaggatagcagacgcaaaagaagttatggagtatttaactaagatagtaagaaatgaagcaaaagaggaagtggttgtagtttctgaatatggtccagaaataataaaaaaagacgtaagtataagagataggaacaaagctgctgaattattaggtaagaggtataggttgttcaccgataaggtagaagttgaaggagctattcctatagttataactggagatgatgaaattgaagattaagaaaataaatatagcaaagctagtaggtaaggggtataaagactattggagatttaagggtcgttatagagtctgtaaaggttcaagagcttctaaaaaatcaaagacaacagctttatattatattactaagttaatgcaacatccagaagctaatttattagttgtgaggaaagtgtttggaacattaagagatagttgctataaggaactcaaatgggctatacatcagttaggagtagataattattgggatagtacaactaatccacttgaaattacatatattcctacaggacaaaagatatactttagaggatttgatgacccacttaaaattacctctattactgttgatgttggagtactttgctggtgttggattgaagaagcttacgagataacagatgaaaatagttttaatatgttagatgaaagtataagaggtaaagttccaagtggattattcaaacaaataacaatgacctttaatccttggaatgagcaccattggattaaaaaaagattttttgatacaaaggataaggatatactttcaaagactactaattatctttgcaatgaatttttagatgatgcagataagaaagtgtttgaaactatgaaaaagaacaatccaaggcgttacaaggtagcagggcttggtgattggggtattgttgatggattagtatatgaaaactgggaagagagagtatttaatatagacactcttatagagcagaatatcaaatcagcttttgggatggactttggttatactaacgacccaacaactttattttgtggtttagtgaatgaaccttcaaaagagatttatgtatttgatgaaatatataaacatggtatgtctaatgagagactttatagagaagttagtaggaaaggatattctaaagaacatataacagcagattcagcttctccaaaagatatagaccatctaagagagttagggttaagaaatataaaaggttcaagaaaaggaaaagacagtgtaaataatggcattcaatatatacaagattacaagattataatacatcctaaatgtgtaaactttttaactgaaataagtaattatacttgggataaagataaatttggaaataagattaataaacctatagatgattttaaccatttaatggatgctatgagatatgcactggaagatttcataaaaggagaggtgtttagttttgattaatcttttaagaaagggggtagctaaactgaataatattctaaataaaccactaaaacaatcagcaaacaatttaaaatatatagagtatgaaataaataaatggaaaacatcaaactctagaaaagagcagttacaaggtgataggtattataaaggtgagcacgatattttaagacggaaacgtactgttattggagaaggcggaaagttaacagaagttgaaaatctaccaaataataaaatagtagataataaatatgctaatttagtagaccaaaaggttaattatttgctaggtaaaccacttacctttcaaactgagaatgaaatatataattctttattaaaggatatatttaataagaagtttcttaggacctttaaaaatctttgtgaagattctctaaatggtggtatatcatggttacacccatactatagtgaagatggtaaactaagtttcaaaaggtttccgtcatatgaagtattacctttttggaaagattcagagcatacaatattagattttgcagttagattatatgaagtaaaatcatatagtggagcaaacgaaaagataattgagaaagtagaagtttactcaaaggaaggtatcaagagatatattttacaaggaatgactttgatagttgactcagaaagtccatactcttcttatttagtggttgagactgatgatattcatgaggaacttaattgggataggataccattaataccatttaagtacaacaataaagaaataccacttattaaaagagttaagagtttacaggatggtataaatattatgttgtctgattttgagaacaatatgcaagaagatgctagaaatacaatactggtacttcaaaattatgatggtcaaaatctaggagagtttagaaaaaatctagcacagtatggagctgttaaagttcgtactgtagatggggcagtaggagacttaaaaacactagagataaaagtaaattctgataactataaatctatattagaagtatttaaaaaggcattaattgaaaatggtagaggatatgatgctaaagatgatagaatgagtggaaatccaaatcaaatgaatatacaaagtatgtatagcgatatagatttagatgctaatggtatggaaactgaatttcaagcttcctttgaagaactattgtggtttgtaaatatgcaccttttaaatactggtcaaggaaattatgaaaatgaagaagtagaagtaatctttaatcgagatatattaataaatgaaacagaaagtatttctaactgtcaaaattcagttgggttattatcagatgaaactattatatcccagcatccttggactatagatgttaggcaggaactagaaaagaagaaaaagcaggaagaagctcaaagagagtatgatgatttaattcctaataatcaagatggtgttatagatgaaacataaagattattggagaaagagatttgaacaattagaagaagctcaaaataacaaaagtgtaaaatattatcttgaattagaaaagcaatataaactagctatgaatagcatagaaaaagatatacttgtatggtataacagatttgccaaaaatgaaagaatatctttattagaagctaagaaattattaaatacaagagagctagaagagtttaagtggagtgttgaggaatatgtccgatatggtaaagaaaatgctattaaccaaaagtggatgaaagagttagaaaatgctagtgcaagggttcatataacgaggcttgaagctttaaaactacaaatacaacaacaagtagaagtgctttatggaaatgaacttgatagcattgataggttaatgagagatatttatacaagtggatattatcacacagcttttaatgttcaacaaggaataaatgttggttggagcttaatgtctttagatactaataaaataaataaagttatttctaagccatggaccagtgatgggttaaatttctcagaaagaatttggggtaaacatagacctgctttaatcaatgagttacacactaaattaactcaatcaattattagaggtgagaatcctaaaaaattagtcaatgactttgctaaaagatttaatgtatctaaatctcaagctaagaatttaataatgactgaatcagctttctttgcatcagcttctaggaaagattgtttcaatgatttagatgtagagaaatatgagatagttgccacattagatttaaaaacatcaaatatctgtagagaactagatggtaaagtatttgatatgaaagattataaagttggaataatagctccaccatttcattgccactgtagaactacaacagctccttggttcgaggatgaagaaggttacagagcagcaaaaggagaagatggaaaaacatatgatgtaccatctagtatgaagtatgatgagtggtataagaaatatattgaagatagacttggaaaagaaaaagctgatactcttagaaaaatgcaactaaatgagaataaagatagaaaacaatttaaggaatataaaaaagtattagaaaatgaaataccttctaaatttgatgaataccaacatatgaagtataatgatactataaggtatgaggaagctaaaaagctttataaagatgtaaattggcaagttaagaatcagagaaatttaactagtggaagtgttcattcagtgccatttgaatcaaaaccaaatagtgtatttgataattacaaagatggtaaattaattcaaagaagatactatggtaatacaggaaaacctagattagatttagatttaactgaccatagaaacccaaagcaacataaaattgtacctcataaacatgattggttagctgatgaaaataaccatgataaggtaaaaagagagaaggatatggagcttacaaaggctcataaaatagctaacaaagatattttgaaaggagaataaaatggataataaatttaagaatttacaacatttaattgattctattgatttaggattagatgtagaatttgacttatataataaatcatataatatatctattggagatgatgatacaagatttattactctttgtcctgatggagatacaaagtattataaaaatggtaaagatatggttgataattgcaatattgatggtaaattactaaaggatttatggaaagatatacagatagtaaatatgtaaaggcacttacttaaatggtaaattagtaggtgcctttattatgtgaaaatttaaggaggaataaataatatggctaaatttgtgaagaaaccagttgaagtagaagcttttagattaggttatgatgatttaccaaaatggtttgttgggaatgatagagtttgtaattttatacaagaaaaatgtattggtggtaatgtgagttgtgacttagaaacattagaaggcactatgagagctaataaaggggattatatcatacaaggtgtaaaaggagaaatatatccttgtaaagcagatatatttgaaatgacatatcaaaaagttgaatataggggaaaaaataaattatcaacagagatgactttagattcaacaaactttcaagaaaatattaaaaatgccgcaaaggaattagagttttttatagaaactttagaaaaagcagatgataaaattgataaactaacagaaaaatgaataaatatgcttgtaaagttgatgtagataagattgtaaaacagttaatgaaacgcctaagagaagttattaaatagtttgaggagggttatattattgaaagagtatgtaatttggtttaagagtggaaattgtgtatctggaataacaaacgaagatgttactgataagttaatgaaagattttatggaagctgactcagattgtaggtatttgaaaggatatttagatgaagatggaacaataataatagatttatcacaaatagaagctatatcaataaatacttgtagtgataataataatattggttttagtaagtcctagatagggcttttttattttgtaaaaaatgaaaggagacatttaaaatggattggttaaaagaattgctagaaggaataaaaatagaggataacaagattgatgtagcttctttacaaaagtctatagaaaagaaaataaaagagactacagttaccaaagaagaatatacaaatcttgaaacacaacttaatacagctaatgaaactattgaaggttttaagggagttatgacaaaacaggaagttgaacaattaaaagcaacttatgaagctgaaataaaacagataaggagggattctattgatgaaagattactaatagaaaatagagcaagaaataaaaaagcaacaaaggcattacttgaagatattgaggaagaagattatgaaaagtatgagtctttaagattagcacagattaagaaactacaacaaagtgaagaaagtaagtttttatttgaagaagttcaagaaacaaaagtaaattttagaggagtaaatccaggagaaagtaatcctatagcagaaaaagcaccaaaagattttacttatgaagattggtgtaatcaattagaaaattaaagaaaagaggtaaataaatatggcaaatacaaaatttgacgcaaaatcatttaatgcagaagcatttggaaagtatatggagtcagctccaacattaaagagaaatgaattattaaaatcgagagctttaaaatcaaactcagaaattagaaacttatttagtagccaaacaactacatcatatggaagaatacctatgtatggtaacttagaaggggatgcacttaactatgatggtatgactgatataacagcagatactactgttacctatgaaagaggtgttgtagtagttggtagggctaaagcatggatggaaaaagattttagccaagatataacagcaggtgtagatttcatggctaatgtaagaaataaagtagcttcattttgggaggagattgaccaggatacattgttatcaatattaaaaggtatattctcaatgacaggaactgaaaataagaagtttgttgatgctcatacattagatataactaaaaatggtgatgggaaagtttctgctgaaagccttaatactactatacaaaaagcatgtggtgataataaaaataaatttagtctagctataatgcacagtagtgtagccactaatttagaaaatttaaatctactaacttatctaaaatatactgatgagcaagggatacaaagagatttaggtttagctacatggaatggtagaactgtattaattgatgatagtatgccagtagaagatgttgcagaaagtgcaagtggtgcagatgatggatatacaaaatatactacttatatattaggtgacggagcttttgattatgaagatataggagcaaaagttccttatgaaatggatagagaccctaaaacaaatggtggtcaagatactttatatactagacaaagaaaagtatttgcaccttgtggtatttcgtatgaaaagaaaaaacaagtttcattatctccaacaaaatcagaacttgaagatggttcaaactggactctagtaaatgatggagcaacaaccaaaacaaaatatatagaccataaatcaattgcaattgctcaaataatatcaaagggttaaattttatggaaaataatataattgatgatatagaaaaaagacttgaaagctttgaatatacattaaaagatggagataagtggttaataggttttgttaaagaaaagatagagaatataattaaacttgattgtaatataaatgaaattccaaaagaattaaaaaatattgaaatagatatgatagttggagagttcttatttactaagaagaatatgggtcaattagatatagaaagtctcaattttgaagttgtagaaaagtctatatcagaaggtgatacaaagatagacttttctataggaagtggctcacaaacacctgaacaacgctttgacacttttgtaaactatcttttgacttatggtaagaataaaatattaacttttaggtgtttaagatggtaagcaaatcaaggaaagcaatagaactgttatatagagataaatgcactatagtagagtaccaaccaattaaagaccctataagtaaaaggactagcaataaagaagtagttgtattagaaaatcaaccatgtaagctttcatataaaaatatagcttctgctacagatggaaaagtagctaaacttacacaaactattaaactctttatatctccaaacataagcgttaaagcaggttcaaaacttattataaatgataaagagtatgtaagaagtggagaatcagctatatatccaaatcatcaagaaataatacttgagttatttaaggataaagcataacggctagatggggcagtgttgattttagagagtttaaaagagtttgtaaaaagatggagaagcttacaaagattgatttagataagttttgcaaggatgcagcaagagaattagcagcacgattacttgggaaagtaattagaagaacaccagttgatacaggattcttaagacaaggatggaatggagtggcttatgctaggtcgcttcctgtgtataaacaaggaaataattatattatagaagttgttaatccgactgaatatgcaagttatgtaaatttcgggcatagaactaaagatggtaagggatgggttaaaggacaacatttcttaacaatttcagagatggaactacaaagccaagttgataagattatagagaaaaagttattaatattacttaaaggagtatttgatgcttaataatataattgatggaatatctattaaattagataaaacatttggagagagttatacaatttatagtgaagatgtggagcaaggtattaatgaaccttgtttttttattgttcctttaaatccaagcaagacaccatatccaagcgggagagaattaaagaaaaattcttttgatgtacattatttccctcgttcagaagataagaattttgaaataaatgagatagctgagatgctactggaggaattagagtatatagaaattgatggagatttagtcagaggtacaaatatgaattttgaaattatagacaatgttcttcacttctttgttgattataactattttactataaaaaataatgataccaataagatggatacagtagagttattcggtggtttgaagagaggtgataattttgagtaaagcattaagcaaagaagataactacaagtttactaaggagcagatagttaactctaagaagtatgtaaataaaaaagatttattaaatgcaattttaaaagaaaatgagttatattccttctcagaggtagaggatagaataaataaatttatgaaaggagtgagttagatggctttaggtggaggaacattcgtaacgcaaaataaaatacttcctggtgcatatataaattttatctcagctaagagggcaaccagttcattatcagatagaggtattgttgcaatgcctttagagttagattggggcatagatgaagaagtattccaagtaaccagtgatgattttgagaagtattcagtgaagtattttggatatgattatactcatgagaagctgaaaggtttgagagatttattcaaaaatataaggttgggatatttttataaattaaataaaggcgttaaagccagttgtactatagccacagcaaaatatagtggtatcagaggaaatgacttaaaagtaacagttacaacaaatatagatgataatgctaagtttgatgttgtaacacttttagataataagaaggtagatactcaaatagcaaaggttattacagacttacaagacaatgactatatcacttggaagaaggatgcaacactagaagcaagtgcaggacttgtatttactggtggaactaatggcgaagctgtgacaggagcagagtaccaagctttcttggataaaatagaaagctatagctttaatgctttaggatgtttggctacaacaacagaaattaaaagtttatttgtagaatttacaaggagaatgagagataaggtaggagctaagtttcaaacagtactatataagaaaagtgatgcagattatgaaggtgtagtgtctatagaaaataagattaaagataaagacttagttgaatctagcttaatttactgggctactggagcaatagcaggatgtgatataaataaatctaacactaacaagcgatatgatggtgagtttgatgttgatgttaattatacacaaatacaacttgaagaagctttaaaaactggtaaatttatatttcataaagttggtgatgaagttcatgtgttagaggacataaatacttttgtatcatttacagatgataaaaatgacgatttttcaagtaaccaaagtgttagagtacttgaccaaattgctaatgatatagcgactttatttaatacaaagtacttgggtgaagtaccaaatgataaatctggtcgtatctcgttttggaatgatgtagttaagcatcatgaacaactacaaaatatgagagcaatagaagatttcaaagctgatgatgtttctgtagaacctggaagcgataagaagactgttgtagtaagtgatgctgtaaaagttattagtgctatgagtaagctttatatgactgtttcagttagttaagagaggagtgtgataatagatgtctaaaaatattactatgaatgttagagatgcaataagtggttctaaagctgaatgttttgtaacaataaaaggtaaaagatataattttatgcaagctattaatttagaagctaaaatggaaaagaataaaagtgagatgccgattttaggtagcattacaaaaggaaacaaaagtacaggaagtaaattttcagggagtgcaacattttattataatacttctatttttagagagttgttatatgaatataaagaaacaggtgaagatatttactttgatatgcaaattaccaatgaagaccctacatcaagtgtaggaagacaaactataatacttgaagattgcaacctggatagtggaataattgctaagtttgatgctgatggcgagtatttggatgaggatgtagattttacttttgagaattggagaatagttgagaagttcaatatagcaaatggtatggaataagatacacatttataaattatagatgtgtattttttatttacaaaattaggagatgattaaaattaaagataaatatgagataaaagattcaatttcttttgattatagtaaaaaaagacctatagaagaatgtgttagtgaaatatataaaaaagcagggaaatatcttatagatattgctgataaactggcacttgatacaattgaaggttcatcattaaaaccaattacaataaaaatcaaactagatgaggatggcattgcaacaatagaaaaagaaacaaaatatttaatcatggaggtagaataatatgggagatttaaacgcttttttaagtcaaaatgcaataaaagtagagaatagaaagtatgtggcaagtgaaaggtttgtaggtgaagatggaaaaccagtagaatgggaacttaaagcaatagattcagatagagatagacagttaagaaaaaattctgctatcagagttcctgttataggaaaaaaaggaaaagctacaggacaatacactagtgaaacagattttaatacttacactttgaaattatgtgtggaaactatagtatttccggatttacatgatgcagaattacaaaatagttatggtgtaatgggggcagaggagttattaacaacaatgttgactcctggcgaatatacagacctttcaagtgaggtaggagaggtaaatggttttgatagaacttttgaagataaagtagaagaagcaaaaaactaattgaaggaggcgattatgatgctagtgtagctcattattgccttcataaattcaaatggaaaccacatgaatatacagatttaccagactacgagagggcatttgttgctgcttctatagatattaaagtagaagaagaaataaaagaagaaaagaagaatgctaaagaagctagaaggagtagaaggagataaaatataggtaaaatatgtaagaattatatgttataataattttagcaagaagatgtaatctacaatttatagagtggagttcatgtattaaaaaattatcctcccaacgataagaagggaggtgaatatacatggataattttttatttaatgtgttagctagtgtaacagctagttacatagtttatttgattagcaagttaatcaaaaaagtaaaaagccactctaccgcaaagagtgacttaaagattgatataaattttaaatatcatcgtaaaaaataactttcagttatagaacttcactctaccgcaaatagattgtagttcttcttgcttttattataccacaaattagaaaaaatatgcaaagtacttgttttaatagcaagtacttttttgtgtgaaaaagaaggtgattaaatgaataaagatatagaacttacagaaaaagatttatattgtattgctagacatattcaagtttatgtgtttaaaaaagatgatgaggtcataaaaaaggaagataatccatgttgcagatgtaaatatagatatgagtgttacaaaaataatgtttgtatttatcactgcaccacatttaagaagttatctaaaattacaggtcttaaaatgggtccaggaataaagatttagtacatttttagagccgccttaactaattcacaatcaaaagttccccaaaatggacattcatcagaacagggagaatctaagcgtatgaattttaaatctctttcagcaggagtaatacctatgccaggaatttcagaaaattcagcagttgccattatattttcatctgctactgaacagtactcataaatactttcaaataccatatattcaccatcctttcataattagtttagaagtatctaccaatacctcttgaattaattatagcatggtatattagggagatttgtttatattaagaataatatgtaaaaattttatgtttgtagtatatgaactaaataaaaaaaggaagcacttacttttggtaggtgttttttttatcgaaaggatgtgatgataatgtaaaaattttacttatatagtataataatcttataaaattattatattagggggatttattatgttttgttcaaattgtggtgcagaaattacaggtataggtaagttttgttcaagttgtggggttgctgtagaaaccgaaattattgaagataataatattaaatcaaatgatttaatcgttgatgctaatggaatagaaataaatatgactgaaatttatagaaaatatagaaaagaaaaagtaaatgcaataaaaaatgtaatggaaataagtggtttgaatataaaggaagcaaaaaaaatagtggattcttcctttgaagagttaaaaaacaattttattgatgatactatgagtaattcagaaaaggaaaaaataatacaaaatcaaaatagaaaaaataatattgaaaaagctcaacaagaatcagttgcttgttgccctaagtgtggttcaacatccttgacagctcaaaaaaaaggttttggtatagggaaagcagtagtaggagctagtctaactggtggtataggtttagtagctggaaatttaggagcaaagaaagttagagttacatgcttgaattgtgggaaacagttttgggcaggcaaaaaatagatgtattaattataaaaacacttactaatttagtaagtgtttttattatctaaattaacagaaaggagagtgaaaaaatggctacaatacagacatcaattcgcatatttgatggaatgacacctgtatttcggcatatgacaactgctatgaatatagtactgagttcatttgagcaattacaaagaacttctagtaatgcagtaaatactaatagcataataagagctagagaagaactagcaagagcagaagctggatttgatagattagaacgacaaataagagaatcagataatcaacagcgaaaacttaatgaggatataaataagggtgcaagttctacagatagattagttggaagtgcaaagaagctagcagcaacttatttaggtataagaacattaggaggtctaggaaatttaagcgaccagatgacaagtactaatgcgagacttggcatgataaatgatgggcaacaatcagatgctggacttaataaaatgatatttcaatcagctgaaaggtcaagagcatcttattttgatactgcaaagatagtttcacgaataggtatgaacgcaggtaaagcattctctagtactagagaaatagtaagctttgctgaacaacttaacaaaaagttcgtaatagcaggtgcaagtactgaggaaatgaattcggctcttttgcagttgactcaagggttaggaagtggagttttgcgtggagaagagttaaatgctgtgtttgagtcagcacctaacataatacaaagtatcgctgattacctcaacgtggatataggaaaaataaggagcatggcaagtgaaggtatgttaacagcagatattgtgaaaaattccttgcttgcagcagcagaacagactaacgcagaatttgagaagatgccttatacatttgggcagatttggacatcaataaaaaataatgcaattatgatatttggcgttatacaaaaaaagatagaacaatctatgtctagtaagggatttcgaacctttatagataattttatagatagtttatatattttaggtaatgtattttttaatatttttaatggaattataagcatattaggaagcccgttttttcaagcatttgtaaatgcgattattgtaggtgttagtttaatagtgcaggcactaggttggataataacacaggcattaaatattgctaatgtgtttgctcagaactggagtattattgcaccaatagtacttggagttgcggctgctatgttagtgtataacaatgcgttattacttagtattgcaaataaagttaaagatattgcactatctgccaaatctttagtcatgagctttgcacatatagtagcagagtcttatagagcagcagctttagtagcaactacaatagcacaagacggattaaatgcagcaatggcagcttgtcctattacttggattttatatggaattatagctatagttgctgccttttttgtagctatagcagtttttaatcattttgcaggcactagtgtatctgctataggggtagttgcaggtgcaatatcagttgcagcctctttcataggaaacttatttattgcaacagggaacttaattatagacattgtagctttaatatacaatactttagcaggttttgcagagttctttgctaattttttagatgacccaattggctctgttataagagcagtatctggaatggctaatgctgtattaggtattataagaagtatcgcaagtgcatttgatacagtttttggctcaaatttggcagatgcagtaagtggatggcaagatacattacaaggttggactgacaaagtagcaggagaagctaagataaaagttgaacgaatggaccctaataaactgcattttgacagatttaattatggaaaagcttgggatgcaggatataaatggggagataaactagaaactaatataaaagataaattcgatattagcaaaatagcagaaaaggcaaaaaaagatttaggattagacgacctttgggacaaaaaatatggtcttggcgattcaataggttctgcaggtcttaactctccactcagcgacgcagcaaaaggagcaaaagatacggcaggaaacacagcaaagatggcaaaaacaatggataaaagtcaagaagatttaaaatatcttagagatattgcagagcaagaaacaatcaatcgattcacaggagtaaacattaaaattgatatgaacaatacaaacaacataagtaaagatacagatgttgatggaatagtaaatgtactaactgaaaaattaaatgatgcaatggttgtttcagcagaaggaatagtttagagaggaggtgtaatcatggcttatgatttttacttggatggagtacaattaccaattacacctggcaaattagaaataaaaacaacaaataaaaataaaactgtagaccttataaatgatggagaagtaaacatattaaagactcctggtctatctgagataagttttgaagcagaatttacacataataaattaccattttgtagagggcaatttagagatgtacaattctttttaagtaaattagaactattaaaaacagattgtaagccatttcaatttattgtatctcgacaacttgggaataaagtactatttaatacaaatagaaaagtatcacttgaggaatataacatagtagaagatgcagaaaatggttcagattttaaggttgcaataaagttaaaacaatatagagattactcaactaaaaagttagttcttgcccctcctaaaaatgagactggtagacctaatgtaaagatagagccaaaacgagttgattcagtcaatgccacaaacactaaaacatatacagtaaaagcaggggatagcctttggtcaatttgtcagaaacaacttggtaatggttcattatataagaaggtatatgagttaaataaaacaatgatggataaagctaacaagggtaaaaaagtacctaaatataccatttataaagggcaggtgttaaaacttggctgatgaattagtgttagcaaatgatagagatataaggttagttattgcacattgggaggatttctacgaaccagttgtccttgatggaatcacatgggagatagaaagacgaggagtgccatctaaacttgaatttacaatagtaatggatgatatactacaattctgtgaaggcaactctgtaaggctgtattacaaaggtgtaggtatattctatggatatatatttcagaagaaaagagataaagaaaatcacattaaaattgttgcttacgaccagttaagatattttaaaaataaagatacttacgtatatagtaataaaactgcaagtgaacttgtaaaaatgttagctaaagattttaatttaaaatacaatgtcatagaagacactaagtataaaatctctaggatagaggagaataaaactttatttgatatgatactaactgcacttgatgatactttaagagagaaaaaagaaatgtataccttgtatgatgattttggaagaataacattaaagaatgttgcatcaatgaaactggatactgtcatgaacaatgatgtaattgaggattttgactataattcatcaatagatagtgatacttatacaaaaataaaactagtaagagacaacgaagagacaggtaaaagggatgtgtatattgcacaagattctacgcatatgagaagttggggaatacttcaaatgtttgatacagtagacaaaaacatgagtgaagcagagataaaacaaaaatgtgatatacttttaaaactatataataagaaaactaagtcgctaagtttaaaaaacgcaattggagatattagagtaagagcaggttgtttagtacctgtttttttgtcgttaggagatatagagttacaaaattatatgttagttgagaaagtaaaacatacatttgaaaataattcacatttcatggatttgactcttgttgatggagatgaatttgcttcttattcttcaagctcatatagtagtggaaatactaataataaagatgaaaagaaaaatggtcctgcacaaagtactacgaaaaaaaatacaggaagaaaagtaccagcattatttacagcatattatcctggacctggtatagaaggtggagataaagattgtactggaaaaaaattagttcctaaaaatcaaacttgtgcagctcctatggatgtaaagaaatattataaaagttggtatagtgaaaagtttttaaaggaccatccatttataaaactaaatgataaaatcaaagtaatattaccaggttcatctatagatggaaaaacttatacggttagagataatggaagtgctattaatatatcttcatcaggagtttatgacatagatatattaatgtctacagcaagtgaatgtaataggtttggcaaaagaaaagggtatataattataaatggagaggaagaagaaacttatcaaattcaaggtaataatcaagttagtaatacaaataacaactctaaagcagataaactaattagtgtagcaaaaagtaaactgggttgtaattatgtgtatggagcagaaggtcctaataattttgattgcagtgggtttactcaatggtgttataaacaaataggtataaaaattcctcgtactgcttctgcacaaagtaaagcaggaaaagcagtagatttaaaagatagaagtaagtggaaagcaggagacttattatgtagaattggtggaggaagtagtaatcatgttgtaatgtatattggaaacaatcaaataattcattcaccacaaacaggagatgtggtaaaaatagagtctgttaattcttatagaaaaggaaaagcgtacacacatgtaagaagatttatataagtgaggtgataaagtgtcacaagaattattacaagtaatcaagaaggctgcaatggatgcagtagaaacaagtaatccaatgactcttgcatttggaactatagaaagtgttaatcctttagtagttaagatagagcaaaaagcatcctttgaagaattttttttaatacagacagatacatttaaaagatatacagataaaaaagtaggagataagttagtattaattcgtatgcaaggagggcaacaatatttaatattagataggatgtgatgaagtgataccaagcgataatgttgactatgatattgaagatgtatcaattataaattttaatgtaagacaagaaccaagtaagacatttaaactgaatacagaaaagtctaagatagatggtatttgtgatgatgttgaagcattaaaacaggccatctttttaattttaaatactgaaaggtatgagcacctcatttattcttggaattatggagtcgagttaaacgaccttattggagaacctgtctcatatgtaatacccgaacttgaaagacgaatcaaagaagcactaattcaagatgatagggttgaaaatgtagataattttgagtttcaaaatgtaaagggtaaagtacattgtaagttcacagtttacagtaaatatggaaatataaaagcagagaaggtggtgagtgtataattgtttgagttaatgacatttgaaaatataattaaaagaatgttagatagtgtaccagatacttttgataaaagggaaggttctataatatataatgccttggcaccagttgctatagaacttacagaaacatacattgcaatggatgaattactagaccaaacattcgtagatactgctagttattactatttagagaagagatgtaaagagcgaggaattacacctttacctgcaaccaatacaattgcaaaaggagtttttaacatagatattccacttgattctaggtttaatctaggagaatataactatgtagcaattgagagaatatctgaaggtatatataagatgaaatgtgaaactgctggacctatttttgagttggggcaactaatacctattgaatatatagatggtcttgaaacagcagagttaacagaaatactgataaatggagaagatgaagaatcagaggacagtctaaggcaacgatattatgatagtttaaattctcaatcttttgggggtaatatacaaaactataaggatgaagttaataaattgcctgacgttgggggagttaaagtatatccagtttggaacggtggaggtactgttaagttagtaataattaattctaacttcaaagttccatctagtgatttagttaatttagttcaagaagaaattgaccctctacaaaaccaaggagaaggtcttggattagcaccaattggacaccgagtcacagttgaaggagttacaagtacaactataaatatatcagcagaaataacatataagagtggatatacatgggagaatataaaaacaattgcagaagaagcagttgatgactatttaaatgaacttaatatgagttgggaagatgaagaaaacttaatagtccgtatatctcagatagaaactcgtttgttaagtatagatggagtgttagatattacaaacacaatgataaatgatgttaaatctaatctaacaatagatagtaacagtatagtagtgagaggtgaggtagttggataaagagattaatctaataaattacttgccacaaattctacaagataaagaagaatatataaaagtatttaatgcagaaaacaaagaaataaaaacattacatgataaattaaaggacctatcaaatgaccagtttttagaggacctaactataagtggtataaaaagatgggaaaagataatgtctataactcctaaaagtaatgagagtttagaagatagaaggtttaggatttttagtaaatatataagtaaactaccttactcagagagatttttaaggaactggctagataatgtagttggagaaggcaattatgaattaactattaataatgctacttataacatacaccttgagagtgatgctagaaatcaagattggtttgaggaagttcattcttttgtaagtaatattaagccatgtaacatgacactagattacactagagtgcttataagcaaagacaattatatgaattttggtataacaaccttaatgggtcaagaaataactatatacccttggagtccaccagatatagaaacttatggagaaattgatgtattaactggcaatggagttggataccaagaggtaacaatattttaggaggtgatatattggctatagataaaagttattacactataattacagatgtaggaaaagcaaagatagcaaatgcaagtgtcacaggtaataaagtgggatttgtaaaaattcaacttggtgatggaggagggagtgaatatactccaactgagagtcagacagctctcaaaaatgtggtatgggaaggcaatatcggaaatacaactacagatgaaactgcaccaaattgtataatattagagagtttaataccatcaagtgtaggcgggtttatgataagagaaataggatatttagatgatgaaaataatttaattgccatttctaaatacaaagagtgttataaaccttctatagaacaaggtgcagtggtagacatgaaggttaaaactgtgcttattgtatctaatgtaaataatatagaacttaaaattgacccaacaataatctttgcaacactcaaagatatacaagacttagaaactaaaataagcaatgttaacactaaaatagatacaactaaaacagagttaacaagcaacatagaaactgctaagacagagttaaacaataaaataggtgatacaacacaacttactacaacagataaaacaaatatagtcagtgcaattaatgaggtaaagactagtgtagatagcatagaaacaacagcagagaaaacaagtataaaagatacagataatttatttgaaagtgataatgttgaaggagcattaaaagaagtgatgcaagaagtaaatgacaaaaagactaaaggtatcaaagcttttaataaacttgtagatatattataaaaaggagtgattaagtgacaattaataagctgccaaatagtgcgaacttaaatcaacttatgacttcatttgaaagtggagtgaatgaaattgagacaataaaaaatgaaattgctaatactttaatagcaaaaaagtttaatgtaacacaagaaaatacgttgagagaattgtctgaaaaaataaaaactatagaaactttagaagaaatggtaggagattctgatggggttacaatgtctaaggaatataattgtatttatcgtaattatacaagtagaacaataaatggtgtcaaaacatacggaacaaatcttactagtataaacattgatactgaatattctactgatatgaaaggtaaagtacgtttaagagatatagatagttcagaaaacttgttaataagtgttgataataaaaaacttatcaaacgaagttgttccaactcaggtaagtattgggagcataatctcaataataacattatggattgtgtaaatgtcgataaaagggataatagtataataatatgttattcctctgaaaggtgcatagaaaaattaaattcaaatggaggagtaatatggtcactaaatatagctggttctcaacctttattatgttgttctattgataaggagggatatatagcaactggaggatatgacaaaaaagttcaaagagtatctccaaatggaagtttgttatttgaatatgcaggttttacaaattatgtaacagcaatagcaacagatagtcaagggaatataattttaggtggatatggatatagaatcgacccacctaaaggtattcaaaaaatttctccacaaggagaattactttgggaatataattatctttctaaaacattaccaatttactcaattactgtagatagtcaagataatatttatgtatgtgattggactaatcacttagtaaaattatctaaagatggtaagtttatatggagtattagtattaataattcagagacttttggtagaacattaattgatagtaaagataatatatattatattgctaaacattttttttataaaatatctaatgattgtcagactatagaaaattttgcaacaagcgaaggaaaatttgtatttgttgagttaataactatagatgcaactcacgatgatagaatttggtgttttgattattcgggtgctaataattatttttatagatatagctatccaactgatttcacttcaacatcaacattagttttttcaaaaagttataaagctggacttaaatagaaaaattaacgaaaggaattttaaattatgatttatttaggaaatttactagacacaaaggaacaaaatataaaatatattggaatgatacactataaaccaagtgtattaggagaagaagacttaaaagagggcatcttagttgaggaattgccgacacaacaatatgcagagaataaagaggcaaagttatttataaatatagatactaaagaagttttctatagatatacagatattaaaagtagtatagaagataaagtaaattctacagaacaaacaatagcagatttaacatttcaattaatgaataatggggtgatatagtatgaattggtataagataataacagacttctacagaaatgggaactggactaaagaacaagttaaaatggcagttgcaaagaataagataacatcaatagaatataaagaaattgtaggagaggactatatagcatagtctttttttattcaaaaattaggaggcctacatgaatgaagaagttataaaagaaaaaataaaacgaaatgaaataagaataaacagacacagtgatgaaatagacgaattaaagatagcaaatatagagtctaaagcagagttaaaagcattgtgtgagaatttaaattcacttacaagcatgttgtggctaattggaacaatgattacaacactgataggattctttatatttgcagttcaaagaggaatattttaattaattaggaggataagagatggataatttaataagttttataccagagcagttgctaattttagtagctgctctctctattataggtaaaggttgtaaaaaatataaacaactagataataaatacattccaattatattacttgtgttgggaatcggattttctatttggatgctagggtttagtcctaacgcagtattacaaggtgtaatttgttggggtatatcaataggtataaatcaaacttacaaacagttgaaggatggtgaaaaataatgaaaatagcaatagtaccaggacacactttaagtggaaaaggaacaggagcaactggctatatagatgaaggaaaagaaaatagaatcttaactgatttaatagtaaaatggttgaaacaaggtggagctactgtatatactggaaaagtagataaatctaataactatttagcagaacaatgtgaaattgccaataggcaaaatgtagacttagcagtacaaatccatttcaacgcaaataaaacaactctaaatcctatgggtacagagacaatatacaaaactaacaatggtaaggtatatgctgaaagagtcaacaaaaaactatcaacaatatttaaaaatagaggtgcaaaatcagatgtaaggggcttgtattggcttagtcatacaaaagcaccagcaatattaattgaaacttgttttgtagatagtaaagctgatacagattattatattagacataaagatacagttgctaaattaatagcagaaggtattttaaataaaactatagataataaagagaatagcgaggggaaaatcatgtacaaacatacaatcgtttatgatggagcagttgacaaaatacctgcaactgtggttggctggggatataatgatggtaaaatactaatatgtgatataaaagattacatacctggccagacacaaaatctttatgtcatagggggtggagcatgtgaaaagataagttctattactaaagaacattatacaatgataaagggtaatgatagatttgatacactttacaaagcattggattttattgatagatagattaagatatttatttacactttacttacaatttcaatacaaaaggaacttaaatatatgatataactaagataagacatacttatgttaatttgattttaaatatacaaaatatacagatgaataggtatataaaataaataaatgaacaaaattatatataactaataaaatgtagttacatatttttattaaattgtttttgaaaaattaactttaagaatgtattaatatcataatgaatataaattgtattaaataaagagttattctatagattgcaaatgtaggttatatctaatataattagtgtataccataatttgtaatccgaaaaggaggaatttatggtagaaaagttaaagggggggaaatttatgtataaaatggaactattaaataacattaattatagtgttaagtatatacaagagattcctcagagtagtatcgctgagtatgaacaattttgtgagtggttaaatgataaatataaagatgataagagaaagataaacgaaaataatctagagtattttgatagttctttaaataagattaagattttactggagggaattaataaaaatataaagtctatagaaaagattataaatctaaataagatagattttgataataaagaacattttatagaacttttggaggatatgaaggatgagtatgaatttttgactgatactgattctactgactatgaacattttaaccgaatcatgtcttggtatagattgacaccagattatttggattcatcaataaaacatttagcaaacaataaagttgatttgaaaggtatagattttgatgaggtattaacttcagaacaatatagtgtaaaaataattgaagatgaactttaagggggatttaaaggaaaaatgatgcttaattgtagcgtgtgtaagaatatagaagactataagattatattgacatctttgaacataagtaataagttggtagaactgccagaaaaattatcagttggcattaaatttgaatttttagatttagaatttgaaaaagataaaataaaagtaccttttaatttagacataataggtatggataaagaggtagatgaagattttatagacaaaagtgacgatgatgtattatttaaaataaatttagtttataataatgtattatacttagaaaatgagattgagaataagacagatttaaataaagaattagaaaagtatgtttattttttacttgaaccaactttaaatgaaactatatcttcaatcggaaataaaattggaatcccaagcttaaggattccaaaaaggataaagtagtatgaagataactataagctataatcaaatcatttatcaagaagaacatattgtatttgaattgtctaatttaatattagataatccaaaattattaacagttttagctaacatatatatattgattggagaattaaaacaaaagaaaaatttagacaaagagaagcaaactaaaaatattgtaagacgtgttacaaaaaaagctcttttttctggttggataagcgaagaaatagggcaagattttattagatgttggaatgaaataagtagtgaaaatttaggaaaagtattagaacaaataatatcaagaattggaccttatgatgtagaaaaatttgaagattttcataaatcgatggaagtaaaagttactcagacaggtatgaaaaatgattttgatgtagttttttttgaaagagaatcaaatcattgttataaaaaaggagagtatatagatatatctggttatggtgagttccatgaatgtaaaaaaaatatctgtacatatatacctaaagacccgaagagtgatttagataagagagtatcaaataaattaaaatttataaaagccacatatgaattaaaaaaagataataagttttatatcccaactttttttcctatggttaagtcacaaagagaatttttaaaagattatttaaatggagaatacaattttatagaaatattggatatatatcaacttgaaaataaaattatgcttagttaaattaaagctatttctcagcttggtaaaatgtgagcttacaaagcacaacaaaattacataatattatattaagtaaaaggtggtaggaaaatcctatcaccttttttgattattaattatatcatggttttattataaataatttatatagttatatatttctttctaattagataatataatgctgttgttataatggctactaatattattgctaatattgtaatatctaatcttcttgtaaataagcctattgctatatactcaagacctgttacatagcgataaagtacttctagtttaacagtttttttcttatctatatttccatatattgattctaatttattaaaatattttttactacaaaaagcagttttaggtttaattaaatatattattgtagttcctattataactattattccaataagtataagattgatattcccaaaattcatagtaggatacctccttcataatttagcaaaatagagttaattttcttaatcaaagtatatcagcaatataagtataaagagtatctaaaatattacaaatattaacaggatacataaaactatagtataagttgtaataataaaacgaacgaaaatcatcatactaaaacataagaaaaattgtatcagatatatacattaacatacaccaaagcactcttataaaaagagtgcttattttttattaattatttttatatggaataaattggaatattatatttgttccaatctgattgattacatactattattagtataaaatttaattatacataaattggtaagaggtgtaaactaatgaagattaataaattaccacatgcggaactaaaactaatgaagtatatttggggagtagatgatgtattagcctcaagagatatcatagaaacaatgaagttgaaatacgattggaaaaagagtacaacattgacatttttaaaaaatttagtagataagggctttttaactactgataaggtagatagatgtacgcattatactatagctataaaagagaaagattatttaaaagttgagacaaagagtttctttagttttatgcataacaattcatttaagagttttatttcagcattacatgatgatgaagttttagatagtaaaagcttggacaaattagaagaatactttaaaaatttgaaagaagaagatattgatgactaataaagctatcagtatctttttagtttgagacaattgagagtagcgttttgatttaatgttagtgttatgtgatggtagaaaattatataaagaaaagtgattatttccttagtatttgatagtaaaaaatatagaaaataataccaactaaattttaaagaaagatatgaaatactacaatagcttaaatcatgcaaatatgataaagaaattgaaattataaaaggaatataattttagaagaaatagttgacagataaattaccttactatattattgtattaataaaataatacaataatatagtaaggaggtaataaatgaaatctagaaaacataatattacaaaaggattatttatagtttacataattgttttaacatggataatactattcaagttgcaatttgatatttcatcccttgaaaccatgaatcttagaagcataaacttagtaccttttgctgggtcacttataattaataatagagtagatatatcagagattatattaaatgtggttatatttgtaccatttgggatatatgtgtgtatgctaaaagaaaaatggagctttataaaaaaagttatacctatttttataactagtttagcatttgaaacacttcaatatatatttgcactaggtgcaagtgatataacggatttgataggaaatacactaggaggaatcataggaatagctgtttttatgctattatcgaaaatatttaagaataatgccataaaaattatcaatgtattggcattgattgtgacaattattgttgtattatttttaggattagttatttttgcaaacttatagaaataagtatatatgtttagcttaaaataaaatgtaagatacaattacatataaaattatttacacataaaaagcacctatacaggtgctttcctaaattattaaagaattattgtatcttgaaactcttgtatgttcaattcttgattttctcttgttttttctaataaatctaacgcacaatttatacaaactttaatttctgcattggtatttttctcataataagttatatatttatttctatatttatctatttcttttccacaacgactacacattacaattacgctcatatcttagttcctccatctctaattattcttaatatattcaatagtatcacttttctgaaaataatgattgttaaaactgtatcaaatttagatttactttttattataatgcattttaataaaaaaataaaggttatgagtaaaatatttatagaaaaaagtatattattgaatagattataaaattttattattttttatcagtcttaaatacacattaatatctataaaatgacaaaataaaaaatactatttaaatagatattaaaaaagtgataccaagtatttgtttgctatatgaataacaatttatttaggagctttactttgacactgtataataataaagtaattgctaaaaacgttggatgatttggatgtatttttagaaattagaaaaatatatacttactgactaatgataatcttatatgtattttagtttgagtgatttaagaaaagtgttttgaaaagggattattttatagagtaaataaatatatatatggtagaaaaattacatataaaaagtagagtttatttcattaccttctttatctgttccgatggggtcttgtagagatacttgagttttattttttttgttagatctaatattcattaaaatctcattttcaatacatctagaagcatatgttgctaatcgagttcccttatctatgttataagtttctatagctttaattaatcctattgtacctatggatattaaatcatcctgatcttccgttgaattattatatttctttgctatataagctactaatctcatgtttctttcaattaatgtatcttttgcacttttatcgttttctattttaaatttagttaaatactcaatctcttcttcaggggttaagggtttttcaaaagatttaagagctgccaataggtcacccccttttcaacggtcactttaaattatatgaaggagacttatccaagttgactgttatctaataaaataatatgcatatttttagaatttaaaacatatatttgcaaacttttgaatggaatatgacataaagagtgggaatttaaatttaagtttttgttgtatatatatgaaacaaggcgaagaaattattgatttataaagtataaattggaattgaggtgtcaataaatataaaaggaaatagtatttatatatgttttggtgttgaggtaaaagattaatgcaaagcattagagtctataaaaatatgaatataggaggtgtaattttacaatacttaaaaaagtaaatgtaattaattgtttgtataaagttgattacaagcaaaaagtatcagtcatagttaattctgttaaggatgaaggtggtgtgttaatttatatatgtatgggaagaaattttgattacaatgaaaaaacttacaaaagatatttatgaaaaaacttatagttaaatgtttatatataaaatattatttaggggttgtttttattattgaaaataagaaagagtggttttatatcaatcgaatgtataataagtattgctatattatatgtggctgtttatttagtttctacatcattgtataattgttatagttttatcagtagaaatatatctgacagagaaatgttaagtacagcaaaaaaatatatagaagatgagaagtatagaatacaaaatagtaagtatgagttaattgaagataagatagaaaaaaattacataaatggatatgaaattaacagtagaatagagcaaattttagattattatcaatgctatgaaataaatatagagataaaaaatgaatttaaaaaactgaggtttaatagctatgttactagaaaataaaggctctatattaataataacattgataatattttctattataagtactgtgtgcattatgtgtataggtttaatttatacacataataatatgtttgagttaggatacaaggacattcaactaaaagaaatttctttaagtggaatagaaatatcagtaagtaatgtactttcttgtgttgaggaagctattgatgtatctaataatgaagacgaatttagagaatatttcttaggaaataatatgattgaatgtataaaaaaaataaaagatacatcttatagtagtttagaagaactttctttaaaagtagaaaataatactatttatgacagaggagatttttttgaatttgatatagaaagtaatgttagagaaaaagaatttttaaaagcaataaaagtaagagtgaaaatcaaaaatccatggataggaattgacattgaagattatatggataaatctaataacaataaaattgatgacaaaacattcaataattataaagcatctgaaaataatgaaattctaaatcaatttaaaaatgaaagtgaaaatataaggaatcaagaggttgttgaatttacagaagaagatgaagaatatgaagaagaacttaaacaaaacataattgaaaatataaagaagaattttgatgaaaaaaaactagtacaggtatataagtataggggtgtataactttgaaaaaagaaggaatgtgactgtaatagaattaatagtatctatcagtataatactcttgatagttacattatcttttccaaaagataatcttgaaaatcataaaataaatttatttgcacgtcaactttgttcagatataaggtatgttaggcgaattaatatgtttagcaactacaatacatatatatattatataaatcaaggtaaacacgaaggttatgtattgagaaaagatggtaaaaacattaaatcaataatgctacctaaaaatgcaaaaatagctagaagtattgaaataataaagtttaaatctgatgggtcgcctcaaaaggcgtctacaatagagatatataataatagattaagaaaaactataacaataacacctgtaagtggaagagtacttctgaaagagggaaaatatgaaacataaatatggttacttgcttttggaaagtgtagtatcattgtcttcaatggtgataattatactagttttatattctatatttttgtctacaataaacttaaagttaaaagtagaagataagatagaactacaacaacaaagtcttgaaatcataaaatctatggaaggaattattagcaattctatgggaataatgaatgtatctaattatgaagaaacatttaaaaagacaacgtctataaaatgtagatatgtagatgaaaataataatgaagaaagcataagtaataaagaaattatattgaatgaaagacgaaataagttatttgtaaattctttaaatggcgaaagtagtcaagcaggtggttatgaaattggagattatgtagatgagatgtatgtattaattactaataatggtcaatatgttaatattaaattgaaattatcaaaacgtagtcaaaaatatgagactgatttcaaaataaaagtatggaattttagtgaaagtatataaaaatacataaatttaagataaagaaatgacatcaataagtcatataaaatataattattgagaactatataactaaataatatcaatatgtaaagtgtatagattaagaatatagaggataataataaaaatatagaataagtaatttgccaaatacttgtttatattgtataacttatgatattatgatattagtaaaaatttgtaatcctgacttgacagaattcaagtaagagatataattttaaaggcatagtaatgtaaaatttactaaaaaataagaaatttattttaatatggaggaacaaaaaatggtatcagcaggtgattttagaaaaggtgttacatttgaaaaagatggacaaccatgtttagtagttgattttcaacacgttaagccaggtaaaggagctgctttcgttagaactaaatacaaaaacttaaaaacaggagctataagagaagaaagtttcaatccaagtgaaaaattccctaaggctgttatagatacaagacaaatgcaatatctatacaatgatggtgagttatattattttatggatcaagaaaattttgaacaaataccattaaactatgagcaagttgaagatgcaattaagttcttaaaagaaaatgaagttgctacaataagattttaccaaggacaaccattccaagtggaagcgccaaactttgcagagctagaagttacagatacagagccaggtataaaaggtgatacagcaagtaatgtaactaaagcagctacagttgaaactggagcagttgttcaagttccattatttataaatactggagataaagtaaagatagatactagaacaggtgaatatttatcaagagtataaaaatttatgtatataaaagcttatatgtcttaataatataagatatatgagcttttagtttatatataaaaaagaaagcgaggggtgttacatgaaacatttatatgaagaagttgcatacttaaaaggcctagcagaaggactagaaataagtgctgaaagtaaagaagggaaaatgatacataaaatagttgatgcattagaagtatttgcagatgctattgtaacattggatgaagaacaagaagaacttcaagattttgttgaatctatagatgaagatttagcagatttagaagaagatattgctgacatggaagaagatctttatgaagaagatgacgatgaggatgatgaggacttcagctatatagaaatggaatgcccaaattgtggagagttagtagaaatagacgaagatttgttatatgatgatgaagtagatgttgtttgtcctgattgtaaggctgtgatattatcatcagaagatgattgtgatgatgattgtacatgtggtggttgtccaagttgtgatgatagagagtaaaaattcataagaattaaaactgcctatgatgcctatgagatattttgcttcataggtagttttatttttatgaggaagggtattatgtattttggttttgcaatacttggacaaaaatagtacactagaatttatagaataggattttggagggatgtaaatatgaaaataagtaaaaaattactagataatatacaaagatttgaaaatgttataaattataaatttaaaaataaagaatatatactagaagctcttactcatagttcatattctaatgaaaataaaaaatataattttaacgaaaggttggaatttttaggggattcggttttaggcatagtgataagtgattatttatttaatgaagaagctaatctgcccgaaggggaactaactaaacttagagcaaatatagtttgtgaagattcgttaagtgaagtagctaatgatataaatttaggtattcatatgttattaggtagaggagaagaagcaacaggaggaagacataggacttcaatattagcagacgcatttgaagctgtaatagctgctatatatcttgatggaggttttgaaagtgcaagacagtttatacttcatcatatggaaaatataatttatgattcaagaaaaggaaatatatttagagactacaaaacgcatcttcaagaagtgttacaagggaatggagaaaataatatctggtacaggcttatagaagaaaaaggaccagaccataataaaagatttgtaatggaagttggaattaatgacgatgtattgggtataggagaaggaaagagtaaaaaagaagctgaacagttagctgctaaaatagctttaaagaaaaaattatgggaaaaataaatataatatgtaaaaatataaaaagaaatatttatattagaaggatgttgtagatgaaaaagagaattatacctatatttgttcctcacaaaggatgtcctcatgattgcatattttgtaatcaaaaaaaaataacaggtgtgagtactgatgttactagtgaagatgcaagaaatataattgaggaatgtttagagactatagataaagatgcagatgtagaaatagcattttttggtggtagctttactgctatagatattgatatacaaaaaagtttattatcagttgctaaagaatatgtagaaaaaggtcttgtaaaagatattagaatgtctacaagaccagattgtattgatgaagatatattaagtatgctaaaagaatataagacaagtataattgaactaggagtacaatccttagatgaaaaagtattattagatagtataagaggtcatcaatctgaaattgtatacaagagttcaaagatgataaaaaatagtggaatcaaacttggattacagatgatgattggtcttccagctgacacagaagaaaagtgtatatttacagcaaaaaaatttgtagagctaaaaccagattgtgttagagtctatccaactttggtagtaaaagatacaggtcttgaaaagttaatggaacaaaataaatataatccatttactcttgaagagagtgtaaatatagtaaaaaaagttcttgtactgttttatgttaataatatcaatgtaataagagttgggcttcaagctactgatgatatacaaattggaaaagctgttttagcaggaccatatcatcctgcatttagagagttggtagaagcagatatgataaaagattatttagaatttgttattttgcaaaataaaaatataaagcaaatgttggtcaaatctaataaaaagaatatttctaaaatcataggaaataaaaaaacaaatgttaaatatatggaagaaaaatttggtgtgcttttaaaaacacaagaatccgatttagatataaatcaattagaaattgtgttagatgggaaaagtttaattagtgctaatatgagagacattcatagaaaattgtatgacatttatgacctttagttttaataatgaagggagagaaaagatttgtatttaaaaagactagagttaaagggatttaaatcctttccagtaaaaacagatattatttttaaagaaggaataacagccatagtaggaccaaatgggagtggaaaaagtaatatatctgatgctgtaagatgggtattaggagaacagagtattaagagtcttagaggtgataaactcgaagatgtaatatttgcaggtacagatacaaaaaaacctatgaattattgtgaagtggctcttactattgataattctgaaaatcaattggaattagattttacagaagtaactataagaagaagggcttatagaaatggtgaaagtgaattttttctaaataataaaagttgtagattaaaagatataaaagaagtctttttagatactggtattggaaaagatggttattcaatcatagaacaaggaaaagtagatgaaatattaagtaataatcctttaagcagaagaaaagtttttgatgaagcttgtggcatatcaaaatatagatataaaaaacaggaagcagaaaggaatttaagtaatacaaaggaaaatttagaaagaatagatgatgtatatatagaaattgaaaatcaattaaagcctctttttaatcaacagacaaaggcaaaaaagtacttggaaataagtgaaaaattaaagatacttgaagtaaatagctttataagagaaattgaaggaatagaaaaagaattaagtgaggttaatgaacatcgtaaggttattgaaaaggagctcaatgaaaaagaagaacaaaaaaatgttgtagagaaaaagcaagaagatattaataaagaggtagaggtattacaagatgtaattgaaaaatctgtagattatataaattcaattaaaggagttatatcaaaaaaagagtcccaaataaatttaattaaggaaagaataagaaattttacgaatgaaattagtagaaaaaatttagaaataaatgatataaaagagaagctaaatgaaaataagcaatacataaaagaattagaaagtaataaattatcaggtagtgaagaactatctaccttgcaggaaaatataaaagtattggaggcaagtaaagataaacaaaaaattaagttagaatccctaaataatgagatagaattattgaaagaaagtataattgatatattaaataagaaacaagagtttagtaataagctgtccactttaaacgcaaataaagaaaatatgaatatcagagatgaaaatataaattcagagataacagagttaaacaaaaatattgaaataaaatcatctgaattagatactataaataaagaatttaatatgcaaaatgaaaatttaaagaatgtaaataatagacataaagaattatcaattaatttgcaggattcaattagtgaacacaataaactagaagatgaaatacagaaaagtaaatataatttaaatggatataattcaaagttaaatgtctatatagatatggaaaatcattatgaaggatttaatagaggagtaaaagaagtactaaaaaataaaaatttaaaaggagttcatggagcattaggacaaattataaatgtacctgaaaaatatgagaaatctatagaagcagctcttggtgcttatatgcaaaatataataactgataatgagtttagtgctaagtctgcaataaactatctaaaacagaataatttaggtagagtaacatttcttccattaaatataattaaatcaaataaagtaagtctaggaaatttaaaagcaaatactaagttcataggaatagcaagtgatttaattacatttgatgaaaagtatagaaatataattgaaaatatacttggaagaacaatacttataaataatatagatgagggcataaaatttgcaaaagaaactggtcataggtttaaaatagtaactttagatggtgaaatcttaaatccaggaggttctttgactgggggaagtctaaaaactaatgggaatatactatcgagaaaaagatacattaatgaatatacagaaaagataagtaatatcaagaatgaaatttcacatctagaattaaaaagagaatctttagacaaagatgtgaaaaatatcaaaaatgaaattgattcacatgaaagtaaaataaaagatttagaaaaaagtataataataaaaagtacaagtataaagaatgttgaatctgaaattgaatcgttaaaaggtagtattactaaattagaaaatgagaagaatgatttaaattctaatctaaattatacacttgaaaaaagcgatgatgttagaaaagatatggaagagttagatgatttatacaataaaaataaagaaaaaattgatgcattgaatgaggaaataaaaagatacaatgatttatatgataaagaaaaatctgaatttgatgaattgaacttaagtttagtgaagaaaacagaagcttataatagtatagttagagatataaaaagaatatctggtgaaaattgtgagctagaagaaaagaataaacaattagaagagtcattaaattatgaagaacatgaaataattaaattacaagattctatagccactgaagaaaaagaaaaagaaaatttaacaaaacaactaggggatagtaatagaaatcttgaaactagaaaaatagcaaaagatgatttaaaaaatagttttgatgaaattaataaagaattaaaaactatagatagacagcatatagagcttaaagaaagtttatttaaagttggtggaagattagaaagattaaaaactagtcaagacacatatataaataagttgtttgagcaatatgatatgactttagtacaagcattggaaattaaagatgaagatttggatatagatagaaaattcttagaaagtctaaagagagaaataagaagtcttggaaatataaatataggctctataaaggaatatgaggaaataaaagaaagatacgatttttatagcgaacaaaagcaagatttagaagagtctatggaagagatagaaaaacttatacacactttagaagaaaatatgaaatctgaatttgaaattaagtttgaagaaataagtaaaaattttaaatatgtatataagagattatttggtggaggttgtggagaattaactattttagataaagaaaatttattagaaagtgatatactaataacagctcaacctccagggaaaaaaatgaaaaatttaaatctattatctggtggagagaaagctttaacagcaataagtatattatttgctatattgattacaaagccaacaccattttgtatattagatgagattgaagcgccacttgatgatgcaaatatatttagatttggagaatttttgaaggatttatctaaagagactcaatttatatcagtaactcataggagaggaactatggaagctgctgattatatctatggagttacaatgcaagaaaaagccatttcaaaagttattagcttaaaattaaaagaagctcaggaaataacagatattatataacttagattgacataggaggaataacagtgttaaaaaaattatttggttttggaaaagacaaggaaaaagaaatagaaaaaaaagatgctgaagaagaaatagaagttgaagacagtgttgatagtttagaaaacttggaagaaaccattttttcaggacttgaagaagaagtgatagataaagtggaagatattgaagaaaaaactgaggaaagtgtcaataatgaaggcactgaagaaatcgaaaattttgaaaaaatagaagttgagatggatagtaatgcaaaagaagtagaaaatatttcaaataatgattctcaagaagagataatcgaagaattagaaaattatgatgaaattgagtctaaagagatagaagataaagaagataagaaagttaacttgtttgaaagactaaaacaaggattgacaaaagcaaagcaaggaataactgatagaatagatgaagttttaaaatcatatacaaaaatagatgaagaattacttgaagatttagaggaaattttaataacagcagatgttggtgtaaatacaactatggatataattgaaagactaagagataaaataaagcaaaaaggtattactgaaccaataaaggtaagagaagaacttaaatctatagttgaagatattcttacaaatgaaaactctacactagatatagaaccagcaccatgtataatattaatggtgggtgtaaatggggtcggtaagactactacaataggtaaactagcaaatagatacaaaaaagatggtaaaaaagttttattagcagcagcagatacatttagagcagcagcaacagagcaattagaaatttgggcaaatagaaccaatgtagacataataaaacatcaagagggagcagaccctggagctgtagtatttgatgctataaaagctgcaaaagctagaaaaacagatgtattaatatgtgatacagcaggaagattacacaataaggctaatcttatgaatgaacttggaaaagtatttaaaatagtagatagagaatttccagaagcaaaacgtgaagtacttcttgtggtggatgctacaacaggtcaaaatgcagttgttcaagcaaagacatttaaagaagttgcagatataacaggtatagtacttacaaaacttgatggaactgcaaaaggtggagtagtccttgcagtaaaatcagaagtagatgtacctgtaaaacttattggagttggagaaagtgtagaagacctacaagatttcaatgcaaaatcattttcagatgcattatttggtaactaatgttcttttaaaaataatggttgacaagagtgttgttatgatataaaatacaatagtgtaaagtaaataacctttacagtatactgctaggaagtgtaagatatgaatatagaaaaaatggtcgaaattggattgttatttgaacagtataaagaattattaactgacaagcagaaagaaatagttgctctatactatgaagaagattattctttaggtgaaattagtgaaaatctgaatgtatcaagacaaggtgtttatgataccttaaagcgttcagaaaaaatactaagagattatgaagaaaagttacacttagtatcaaagattcaagagcaggaaaaaaatattaagattataaaagataaaattattgacattaaagaagatttattgcacaatagagattgtgctaatttaatccctaagctagaaaatatagaagatgtatgtagggagatgataaaatgatatttgaaggattgtctgataaactacaaggggcatttagtaagttaaaatctaaaggaaaacttacagaagtagatgtaaaaaatgctatgagagaagttaaacttgctcttcttgaggcagatgttaactttaaagtagttaaagatttcataaaaaaagttcaagagagatgtgttggacaagaagttatgcaaagcttaactccagctcagcatgtaatcaaaattgtaaatgaagagcttacaagtttaatgggagatgtacaaagtaaagtaatgatttcctcaaagcctcctacaattttaatgatggttggattgcaaggtgcaggtaagactactacagcaggaaaacttggaggatattttaaaaagcaaggtaaaaaacctctattagtagcttgtgatatttatagaccggcagctataaagcaacttcaagttgttggagaaaaattggatatacctgtattcaatatgggagataaagaaaatccagtaaatattgcgaaagcaggtttaagccatgcgattaaaaatgctaatgatttagttattatagatacagctggtagacttcatatagatgaagtacttatggctgagttaaagtctattaaatcagaagttaagccacatgagatacttttggttgtagattctatgacaggtcaagatgctgtaaatgttgcagaaagcttcaatgaggcacttggtgttgatggagtagtattaactaaattggatggagatactagaggtggtgctgcactttcaataagagcagttacacaaaagcctataaaatttatggggatgggagaaaagctagatgatatagaacctttccacccagatagaatggcatcaagaatattaggtatgggagatgtcttaagtttaatagaaaaagcacaagaaaatatagacttagagaaagctaaagaattagagcaaaaaattaaaaaacaagagcttgattttgaagatttcttacaacaaatggaacaaatacaaaatatgggacctcttgacaagatacttggtatgatacctggtatgggaaatgtaaaagaccaacttggagatgtagatttgaatggcaaagaaatgaagagaacaaaagccataattcagtcaatgactacatatgagagaagaaacccaggagtattaaatgcttcaagaaagaaaagaatagctaagggcagtggaactagtgtacaagatgtaaatagacttataaaacaacttaatgaaatgaaaaaaatgatgaagatgtttgctggttcacaaaagagtatgaagaaaaggggcggcttaggcggtttacctttttttaaataaaatataaaaaagtaaaaattattcggaggtgactgtaatggcagttaaaataagattaaaaagaatgggagctaacaaaaaacctttctacagaatagtagtagctgattcaagagctccaagagatggaaaatttatagaagaaataggatactataatccaatttctgaacctaaacaagtaagaataaatgatgaaaaagctataaaatggttagctactggtgctcagccaacagaagtagttaaaaaattacttgtaaaaaacggagtaatagaaaaattcgaagcttctaaacaagcaaaataattttttcttggcaattagtttaagtaagggctcattgctaaggttactttaggagatgaaatatatgaaagagctagttgtagatatagctaaggctctagttgataatcctgactcagttgttgttgaggaatttgaagataatgatggtatcgtcttaaagcttacagttgctcaagaggatatgggtaaggttattgggaagcagggaagaatagctaaagctataagaactgtcgtaagatctgttgcaaatagagaaaatataaaagtttctcttgagatagtataaaataggaggattaggtataatgcctagtcctttttatataaatgcgtagtttaagattttatgatgatatgaccacataagattaaattttttaagaaggtgataacatgaaagaaaaattaactcattttaaggtaggtcaaatagtaaatacacaaggtttaaaaggtgaagtaagagtttatccacttactgatgatatagagaggtttgatgaattaaaagatttctatctgggaaaagatttaaataataaattggctgttgaaaaagtaagatacaaaggttctatggttataatgaagataaaaggcatagacagcatagagaaagcagaaaaactaaaaaataaatttatgtatgtatctagagaagatagcagagagcttgaagaaggcgaattttttatagcagatatgattggaatggaagttttaactgtagatggaaaatatgtaggaatactagaagatgttcttcaatactcagcaaatgatgtttatgtagtaaaaggtgaagaagataaagaatttatgataccagctataaaaaaatttgtacctacaatagatattgatgaaagaaaaatgattatagaccctattaagggaatgatagattaggtggtaatatgagatttcatataatgacactttttccagaaatatttaattcgtacatggatgaaagtataatgaagagagcagttgaaaaaggtataattgaggtttatatatataatataagggatttttctaataataaacataaaaaagtagatgattatccatttggaggaggagtggggatggtaatgactcctcaacctatatatgacacatataagcatataataacaactcacaatataagtaatccaagtgtaatttatcttactccaaaaggtaaggtatacaatcaatctatagcaaagcagatgtctttaaaagaagatataatactattatgtggccattatgaaggagtagatgagagaatcattgatttaatagttactgatgaaatttcaattggagattatgtattaactgggggagagctcccagcacttataatgatagattctatatcaagattaataccaggtgtattaaaccaagaagaatcatttgaagaagaatcatttaaagataacttattggaatatcctcattacactagacctagagattttgaaggattaaaagtaccagaagtgcttttatcagggaatcataaaaagatagatgagtggagaagagaagaatctataaggataaccaaagaaagacgatttgatttatataaaaagtctaatgaaaaataaaaatataatgaaaaattaatatatatgtatacaataaagtacctataaatggaattaaaaacataaaagtgcttgtaataactattgaagtatagtataatataaaatgttgaaaatacgggcgttcctctgtttacactggtcgggtagttaagaacgtctatgatatctaggaggaagaaagatgaatgaaatgctaagagcaattgagcaagaacaattaaaaaatgaagttcctaattttggacctggggacacagttaaagtacacgttagaattatagaaggaaaaagagaaagaatacaagtattcgaaggtgtagtattaaagagacaaggtggaggagcaagagaaactttcacagttagaaaaatgtctttcaatgttggtgtagaaagaactttcccagttcactctccaaaaatagaaaaaatagaagttactagaaaaggtaaagtaagaagagctaaactaaactacttaagaggtagagtaggtaaagctgctaagataaaagaagctagaaataaataattaaaaactttacttataaatggggggctgatttatcagtcctctttctattttaatgaaaattacagcaaataattatactagaaataaatagaaatatttgttgaaaatatacattatttatctatgaatttatagcttttaaaatgaaaaataaaattggtaaatattggattatattttgtaacgatattaaaaataagagaacagtattatgtaaagtatgacgttaaaaagatgacaatattatagtttgtgaagatagattttttaagtggaattagaatataataatataatattaataaggagtgatacatgtgtcaaatgaatacgaagagtatcttatggatgacaatctacatataaactggtatccaggtcatatgaaaaaaactaaggagttagtaaaaaataacttaaaattgattgatgtagtaattgaacttttggatgctagaatcccgtttagtagtaaaaatccagacatagacaggcttgtaggagataagccaagagttgtcgtacttaataagagtgatatggcagatagggataaattgaatcaatggattgaatactataagaaaattaatatcaaagctataccagtagatacaataaaaggtgttggtataaataatataatcgaagaatgtaaaaatgtaactagagaaaaaatgagttctttaaaagacaaagggagaaaagaaagagctatacgaataatgatagttggagttccaaacgttggtaaatcgtctcttataaacaaattaacaggtagaaaaagcactcaaactggagataagccaggagtaacgaaagggaaacaatgggttagattaaagggaaatcttgaacttttagatacacctggaatactttggcctaagtttgaagaccaagaagttgcattaaatttagcatttagtagagctataaaggatgagattttagatactgagactttggctttaagacttatagaaaaacttatgaaaatagaacctgagaagttgaaagccagatataagttagattgtctaggagaaactccaattgaaactatggatatgattggccataaaagagggtttataacaggtaaaaaagaactagattatacacgcatagccgcaactgtattaaatgaatttagagatggaaaaataggaaatataacattggaagttccagaaaacgttaaaagatagattttaaaacaaaatcaaagatttaatgttaaaaaaataaaaaagccttttagcaaaggcttttttatttttttgaaatatagacaaatatctccatataaaagtataaattaggttagaaaacctttaaaaatattaatttaagacaaatacacctaatattttgaaaattaaaatgagtgtgattattttaaattttagcatattgacttgcttgtttcgtataatatataataagcacaaataaatacaatatattaaaaatttaatttatttaattttattaatttaataataagttcttattgtttaatttaatttatttatgcaagcgtaaacaatcgagacattttattaatttaataaggttaaaaagggggattttataatgggtaagaccaaggatgttatagtatttggatttgcgttatttgcaatgttctttggagcaggtaacttaatatttccaccttacttgggaataattacaggtccagaatggttaattgccttcttaggatttacgtttgctgatgctggattggcacttctagcagtaatggctacagctaaattcgatggaaacgtagttgaaatgtttaaaagatgtggtatgaagttagggattcttataggttgtgcagacattttatgtataggtccattcttagctataccaagaacaggtgcaacaacttatgaaatgggtataatgcctttatttggaacttcaattccagtgttattattctgtatacttttttttgcgctttcatatgtactaacaataagaccttctaaggtcgtagatatagttggacagtttttaactccagctcttttaatagctctagcatttataattataaaaggtattatatcacctcttggagatatagtagataaacctatgatacctaatgtatttgcagaaggtataggtcaaggatatcagacaatggatgcttttgcagcaatagcacttgcatcagtgttaatagtatctttaaatgataaaggatattctactattagtgacaagttaaaaatgattggtaaggcgggggttcttgcttgtggaggattagctctagtttatggaggattatgtttccttggagcaactgtatcaacaatgtatggaacagatgcagtacaatcacaagtaatagtaaatataactgaaggattacttggaaatgttgggaaagcgattttagcagtagtagtatcattagcatgtttaactacatctataggtcttacatctgccacaggtcaatatttctctagacttacaaaaggtaaattgagttatgaaaaaatagtattagctgtatctgtattcagtgcagtagtagcatcttttggtgttggaactataataaagatagcatctcctatactaagtatagtttatccaccatcaattgttttaataattttagctttcttcaatgaaaaaattaagaatgataatgtgtacaaaggagcagtatatatgtcattgcttgtaagtatactaacagttatatctagttatggagtagatgttccagtagtaaaatctttacctcttcattcattaggatttaactgggtggtaccagttataatagctggaataattggtaattttataccatcaaagagtcaatctaatacacttggaacaaactaagttttgtttaattaaaatataatcaattgtaaataaatgagttaactaaaagtaaaaggagttatttgtacaaataactccttttattttgggattctataattaattatttgtatttaatatggaaaaagtataagaaaatatcaaaaaaatatatagtttattttttaacaataatagagattaaaaaagaattttagagtaattttataaatttaagtatacatattaaatgatttttacaaaaatataatataaataaaattgtgacaataataaaataataaaacaaaatttaagacatatgattatataaatgtattaaataaatgagtaaattgttttcattgagagatatattaagaatttttagttaattatgacatataagtatgtaaacgtgaatactagcaactgcaaagtttaagtaagttggaagttagaaagtaattgctatgaagaaaaataagttgataaatcataataaggaattttcagaaaaaatggttttaagactaaaagacaagaggtaaatctacgtgagtagaataaaaattgaataaagttaactgtcaatttagcaaaataaatacaaaatactacaagaattaacgttaataggtgttatgataaaaggaaaacgattttttaagaatcataattttgaaaattaaaaaaattaaaaatgctattgactgcttttttttcagattatataataaacacaaaatatttaaaatttaaattgaattaaaaagattatatgaatgtaaaaaggagagtgatatatacagtatataaagcaatacaacttaataataaaacgaataatctaaaaagtcttaatattttaattgttctgaatagttaattttatcaaggaaaattagagaaaaaacaaaaaaccaactatgtttaaagtatacaggttgattttgtttaattaagaaagttgtattaaatattgtgaagattttataaattatgaaacataattgacaaatttaagtcaaaaatgtataattaaataaaatctcgtcaaaaggttttcatttaatgaagagattggacttattttttagtaaaaggtagtaaaattcaaatgggggtgctttaaatgggtgagaaacaaatcaattttaaagatgtaattgtaattggatttgcactatttgcaatgttttttggtgcagggaacttaatcttccctccatatctaggagttttatctggaagtagttggctaatagctttcataggattcctttttgcagatggtggtttggcattattagcagttatagcagcaactaagttcaatggagacacatcgaagatgttctcaagagcaggcaaaggattaagtattgcattaggatgtgcaatggtaatctgtatagggccacttttagcaatacctagaacagcagcaacaacttatgaaatgggtatattgcctacaataggttctggaataagtccagtaatattctctatagtattctttgctctagtattggttttaacaataagaccatcaaaagttgtagatatagttgggtcaatattaactccagctttacttatagctttagcagtattaatagttaaaggtatcgtatctccattaggagaaataagagacagttctttaattcaaaatgtatttgcagaaggtataactcaaggttatcaaacaatggatgcattggcagctagtgtatttgcatcaattataatcatgtcagtaatagctaaaggttatacaggtgagaaagaaaagatgaaagccacaataagtgcaggtgtaattgcagtaataggaatggcattagtttatggtggattatgttatcttggagcaactgtgtctcaacaatatggacaagatgttcaacaaacagctttaatagttgcaataacagcagctttacttggaactacaggtaaaattttattggctattatagttgcattagcatgtttaacaacagctataggtctttcttcagcagctggtcaatatttctcaacacttacagatggaaaattaaagtatgagcatatagttatagtagtttgtgtatttagtgcaatcatatcaaactttggagtaagtacaataataaaattctcttctcctatactaagtatggtatatccagcaactataactctagttatactagcattatttagtaataaaattaaaaatgacaacgtgttcaaatgtgctgcatacatggcattattagtaagtgtattaacagttgcaacaagttttggtgtaaaaattcctctagttaatagcttaccatttgcttcattaggatttaactggatagttccagttgtaatagcaggaataataggaaactttattccatctaaaagcagtaaaactgcataataataaaactaattgataattgtggaattgcctttaaattatatggcaattcctttttatatttaaaagaattattaaattattgtggagaaaagaacattattaatctcatttgataaatttatttttggaggagtatgatttataaagacaataaaataaaaaagatttatttataattataaataaaattaaattatatattatgaatgtttaatattaatataaaaacatcaatatatatttttgtaaagaaaaaataaagaatttattttctgaatacttattaattaatcaaagttaaaatgaaaaaaatataaaaaaataaagtatataagagtataatttgacttttatatacttttttatattatttttgagttttttaggaagatattttacaagttaagaaaactataaggagtgttatattgaatataaaatagtataatatatattatgttagataattaatatgaaaatatacaaatatataaaaaagtttgtttagagttatagttaatgtgtgtattaatttaatactaatttattggaggtttaaaaatgaaatacataataaaaagagatggtacaaaagaactttttagtaaaagtaagattgaagatgctgtctataaagctagtataaatagtgaaggtggagtagatagagagttggcatatgatatatcaagaaaaatagctaatgactataattctatggaaaaatgcttatccgtagaagaaatacaagatatagttgaagtactacttatggaatcaaatagaaaagatatagcaaaacactacatattatatagagaaagacgctctgaaataaggactaaagcttgggagtttgatgaattacaaaaatcaatatggaagaacaagtatagacataatggtgagagttttgatgaatggataaagagaatttcaaataatagttcaagaatatcaaaactaataagacaaaaaagatttctatttgctggaagaattttagcaaatagaggattacagaaagaaggaaaaaaagtaacatattctaattgttatgtaatagaaccaccaaaagatagcatagaagatatatttgatactgcaaaaaaacttgctagaacttttagttatggtggaggagttggaattgatatttcaaagctaagaccaaaaggagcgaaagttaacaatgctgcaaaacatacgactggagcagtctcttttatggaactttacagtatgacaactggcttaattggtcaaagagggagaagaggagctcttatgatttctatggatgtaaatcatccggagatagaagagtttatagatataaaaacagatttggagaaggttactaaagcaaatatttccataagggtaacagatgaatttatgcaagctgtaagggaaaaaaagttatataattgtacttttgaagttgaaactactggagaaaaaatagttaagatagtaaatgcttatgatttatttaataaatttgtgaaaaataactgggattatgcagaaccaggtatattgttttgggataaaataaaaacatataattttatgagtgaagataagaacttttgcttttcaggagtaaatccttgtgcagaagaaccacttccaagtggaggaagttgtctacttggctcaataaacttgtcagagtttataatacaaccatttggtgaacatgctacttttgatattaataaattaaaatcttgcgttagagaagctgtagtagctttaaatgatgtcttagatgaggggttgaacttgcatccattacaagaacaaagagatagtgtacataagtatagacagataggtttaggtgtaatgggtatagctgatatgcttataaaaatgggaataagatatggttctgatgaatctttagaactatgtgatttaattggtaagactatgttaaatgaagctgtgaagcaatcagcattaattgctaaagaatatggaacatttagtgagtataaatatgaaaatatttctaaatctaagttttttatagaaaatctaaatgaagacactaaagaaatggttaaaaagtatgggcttagaaattcacaacttttaaccatacctcctacaggttctatatctacaatgataggtatcagtggtggaatagaacctatatttaatctttcatatataagaaaaactgaaagcttgcatgatgaggatgtgtattataaagtatatactccaattgttaaagagtatatggacaagaaaggtattacagatgaagaatgtttaccagatttttttgttactgctatgaatataggatatgaagaaagaataaacatgcaaaaagtatggcaaaagtatattgatgcttctatatcatctacaataaatataccttttgaaactacagttgaagatgttttcaatatatatattaaggcatgggaggctggtcttaaaggagtaacaatatttagagatggatgtaaaaggagtggaattttaataaatgaaaaaaaggaagaaaataataaagaagataaaaaagaaaatagtaaaaaagaatattataaaaataataaaaaagaaaaagataataaagatgaaaaagccaaagaaataataaataaaaattttgaagaagatgaaaaatttgtgtgccctgaatgtggaagtgaaggaattgcacatacaggtggatgtagtatatgtttaaaatgtggctatagtggatgcaattaaactctaattaaaaaattttaatatatttaaaaattaaatttttaaaaacgaaagatgagggaatggtatgcaggataaaagtgtgagggagattaaagaaataatagagactttagaagtagaaaaatatatggaatatatagaactgttaagagttgatgaaagaaaatctgtacaaggtctagctataaaactagcaaaaaagctggataatattagaaaagaagaagaaagattggaaactataaatatatttgagaacgaaggctatgataaaggttatttgtatattggaggaattgatgaggcgggaagagggccacttgctggacctgttgtagcttctgttgtagtatttaaaaaagatacaaaaatagaaggtgtaaatgactctaagaaactgagtgaggcaaaaagagatgaactttttgaagtaataaaagaagaagcactagattatggaataggtatagtaaataatgaagaaatagatgaatttaatatattaaatgctacatatatggcaatgaaaaaggctataaattgtttaaaaaaagcaccggattatttattagttgatgcagcaacaataccaggtattgacatatctcaaaatccaattgtgaaaggagattcaaaatctatatcaatagcagcagcaagtatacttgctaaagttactagggatagtataatgtaccaatatgatagagtatacccagaatatgggtttaaatctcacaaaggatatggaactaaagaacactatgaagctattgaaaaatatggcataactcctatccacagaaaaagttttttgaaaaatatactgtaaatataatatgatataatgtatataatataaattactatagttaatgggggattaaagatggaatataatgaattattaaaaagtgctagagaaaatttaaatggaagttgtaaagtttgtaaggtttgtaatggggttgcttgtgcaggtgaagtgcctggcatgggaggtaaaggaagtggttcttcttttatagaaaatagcaagagtttagaaaaagtaaaagtaaatatgagagtaatacatgatgtatcaaatcctgatacatctatagagatgtttggaaagaaaatgagtgcacctatatttgcagctccagtaacaggaactactttaaatatgggtggaaaaattaatgaaagagattacatagaaccagtagttgcaggatgtgctaatagtggtatttatgcaatggttggtgatacggcagtagatgcttttttaatggaaaatttagatgtagtcaaaaagtataatggagctggaattgtatttattaaaccttgggataatgaaaatattataaaaaagataagattagctgaagaagctggtgcatttgcagttggagttgatatagatgcctgtggtctagtaactttatcattacatggaaaaccagtacttcctaaaaatgttaaacaaataaaggagttagtaaagtctactaaactaccatttatattgaaaggtataatgactgttgaagatgctttaatggcagtagaagcaggtgtgtatgcaatagttgtatcaaatcatggaggaagagtgcttgactgtacaccaggagcatgtgaagttttaccaaaaattgctgatgctgttaaaggtaaagttacaatacttgcagatggtggagtgagaactggtttagacgtactaaaaatgataggtttaggtgcagatgcagtattaataggaagaccttttgtgactgcttcatttggtggtgcaactgatggtgtagaaacttatgtaaataaacttcaatcagagctaagtagttctatgatattaactggatgtcaaactataaaagatattgatggaaaagttatatacaaataaaattttatacaaaaaagaggaaaaatcattttaatgtagaataattgtacaaagggggaatttatatgagtagaaaagcttatgaagaagccttagtagaattagaaaaatttattgatgaaagaaaagaaataattaaaagtgcggaggactgtattgataagtacatagttgacagaacgctaccttttgattacaaagataaatgtgtggaatggcaacaagagttacttgatattgcagaggcacaagttttagaagcaaacgaattaggtgttttactggaagagaaaaaagaacttgaggaagagtaagttttattactaaatctagggaaaatcaagaatatgatttacccctagatttttttatttaaataaagatgtctatataattaatctatctttatcaatgttagattaaaaggtttgaagaaaaatagagtaattgtatgaatagttaaacaattaaactagtctataagaccaatttaattgttattttttgaatttagtatatggtttttcatttcttctaatacaattgtgtaggatttgcattgtgctgcagccaattctgacaaagcaaacctttgagccttatttagaaagtccttatctgtgctacatagttgttttgaattatcttgtatcataagcatcttaattaattttacaatctcaaaaacatctcctgaatgaaatttatcatggtatagtttaagtcgtttttttctatcaaaaacccataaacaatcaaccttatcaagggattggataaagttttcaacttcattttcatccataattggacgtacaccaatcttatcagcatttaaaactggaatcgaaattttaagattactattgtaaataacagtcaattcatagtatttctgtatatgatgatttatatcctttgttacaagaccacttatataacaggctccttcttttggatacattacactttcaccgattttatacatatggttatacctccaaactgaattttagatattgcaatttgggtacaatgctttaattatctaataattaatattatatcacgaaatgcttgacaagtcaaaaagattaatatataataaaaagtttagaataatagatatatataattggctataaaaatataagataagaggatttaatatattaaaatatctagttagtattgtataaaataacatactaactagatttaataattattaatttctagcaaaatctcttaagttaagacttccggctgttacaaataccattccaataagaattaaaacaattatatttattaatatattaccattattattaatagcatctatagtccaataaaatggtgtaagctttgaaagattagccataaaggataatttatcaagtgatggtatcatattagatatggatatagctaaacctattaaagaataaaacgtagacataagacttatagaaccttcgtttttaaacaccctagctatccaaaatacaaatccagtagcaacaaaactatttgctagtacaatcatcaatgtatttagagtcaatttaaaattacttatagatgtgaaacatactaaagttaaggtgtatacaattgcttgagtaaaaaataaccctaaaaatatgctgaaaattatttttatatcattatgctttgtagaaacaagtctttttaaggtattagatttctttaatgaaaataaatcagaagctagatgtgctgcattaatgtacatgaaataacatatcaagaaaactattaaaaatgaatttttattcttacctgaactgttatcaattatatttgtcttggtcaatttatcatctatatttctatctatttttaattttaatgaattagtaataaaagattctatttgtgattctgcccaaagactacctccaccattttcagttttaaaacatttaacctcaggtcgttttaagttatctatattgcttgaaaagtttttatctaaaatgaagacagcagaaactttattattttttaatagatccatagccttgtcttgttcgtttaatccaaatgagttttcttttaatttagaactatctattaacttatgttcgtattttccagaagaattggatacaatcgctactggagaaaagtacattgattgattttctgagttgccagtaaaaaagttaagataaaacattaatataacaggaaacaaaaccatattaactaaaagagcatgattttttatatatctttttatgtttgcaatagtcaacctaatcattattaaacctccctccatttatatttttcttttacaatagaaagtgcaatcaatactgtagatgcaattaggcatgtaaaaattaaactttctattgaatctatagttttaaacgtctcataattactgaacaatgttcctattaaataagtaggagataaacttgtaaacttagtaaacacatcatttactatgctgaaaatacctccaaaaactgtttgcaagaagagtaatgcataaactataactgtaccatatttcttgctaaaaaaggtagttataaaagtagatattgaagtcataaaataagaagctaaagcacaaagtaaagctaatataacaaagttacctttgaatgttacaccgagtgttctaaaaaataaaacgtataatgataaaaatataaatgagtaaatccagaaacctataaaatcataaattaaaaattgtactctagttacaggtatagagtagagtctttttgaaagtccttttgattcacttacataatttgataaaatgctattcattataaaaattattgcgaagaatccaagggaaactaaagcaaagtactcataagagttttgtttaacattattttttattatagaggtatcaatagaattcttattaaataattttgagaaatcttctgaacttaatttttgagaattattcagatataatttttcatgataagtatctaatatatcttgaagtaatattgcaatattatcattagatttaagtttttctatacttagattatttgatttttcatttaataaattattctcatatcctttaggtatagtaagttttaagtctgccttagaatcatctttttgaactgttaatatagaagataaatcgttttttagatatcctgtcaaattacttgatagctttgtattatctttatcatatataacaattgatgtcaaatctgtttttataggattttgaaatatactttctgtcaccatcccaagaaatccagctaaaactagaggtaaggctaagaaatatattaaattaagcataaaggagctttttaaaacttttagcatagtttttacactaatgtacaatttcatgaaatcacctccattagtcccttaaatttttacctgttagatttaaaaatacgtcttctaaactaggttcttcataagatattcgtgttatttttgaattatttttgtcaacaacagataatacatctgtaagttgtaattttttgtctacacctaattctaataatgaattattttctaaaatagatacaacacctttagtattttttaaatcaaatataagttgagcatttatattttttatttccataattaattttgtatttgtagatactaatgattttaaataatcattatctccaaaagcaatctctttaccttcatccataataaaaatcttagaacaaagatgctcaacttcttccatataatgagaagtatatattactgtggttttttgctttttagatatattttttataaaattgaaaatatggtttcttgattgcgggtcaacacctacagttggttcatccaatattaatattttaggatgatttaaaagtgctattccaatgttcaatctcctttgcataccaccagataattttttgatttttttctttttaacatcagtgagtcctgtgacttctaaggcttcagttattctctcttgaagcaattttccctttagtccatagtaagtgccaaagtactctaagttatcaaaaggagtaagagtctctataagtgctaattcttgtggaactaatcctattatagactttgcttttatacaatcttttgacaaatctaaaccattgatttggatgtcgccactatttggtaacataagatttgtaattatatttataagtgtagatttaccagcaccattcggtccaataagtccaaatatctctccttctttaacagaaaagctgatattatcaagtgctaatttatcattaaatctttttgttatattatttactcttactatatccataataattcctcccaaaataattttgtataagttaaaaatctataatactataataaagaattatgaatcataattctattactataagtcactaaaaaaagtgacttaagtcactttatattttcatttattataaatgagtttgtgagtaagaaatttctagggtatagatttcttacctatatatttatattacaattttatttttgaaggcaaatataactagttgtgtcctatcacgaagctctagtttccctaagatattggtgatattattctttattgtaccttcagataagaataattcttggctgatttctttgttgttaagtccatttgcgattaatctaattatggatatttctttttctgttaaattatacatatcagaaatatgtttttgttctatagttttttgagggtacataattttttcagccacacttttatcaagtacaatatttccaaaaaacgaggaacgaatcccttcatgtaatacttcatccgaactatcctttaaaagatatcctgaagccccaaatttcatagcatcttctatgtactcatcatcattaaaggttgtcaaaattaataatgctatagagctatcatattcttttataagtcttgtgcctagaactccatcacaaactttcatccgaatatccataagaactatgtctacatcatttgttttacaaaattctaatgcttcatatccattggaagcatctcctacaatttctaaatcgtcataagatgataaaataatgttaagaccttttctaatcaatttttcatcatctactataagaactttgattttattcaaaaaaatcacctcctgaaaatttaggaaaagacgctctaattgtgaatccagtattagaattatcgaattcaactttaccatttaattcatatattctttcgctaatactgctaagtccatttcctctttttatattgttacaccctataccattatcgctgatagtaattataagatttgaaggattaaatgttataaaaattctgatttcagttgcttttccatgtcttgatgcgttggaaagagattcctgaacaagtctatataaagcgatagattgatttgtagataggttccaggtattttttgatatagttaatctaacgttgatatttgtaagtttaataaagctattaaccagttctctgattttaagtaaattttggtaattttcatattcaatgggttttagttcagatatagctcttctcacatcttgaaaactttcagttacaaactctctaagttcatgaactaaatcagaaatgagaggtttgtcttttaagagtttttctatagcatttaattggattatcgtcgtagaaagagaatgtcccacactatcgtgtatttccctcgatatacggtttctttctttcaaaattgctaactcttctatagaatttgcataaatctctaaatcggcattagctttttttaattcatctttagaaaccctgagtttgtcataaagactttgattgtataatttagataaattctcgttttctagatacacagaaaagagggttataattagtaatgtagaacttgattctagtgctaaatataaatttttatctaaaccaataataaaagaaaatattataactaaagagaataatatatatttatatttttcctttattaaaaatgaggcatccaaaattaaagaaacatagtaaagtggattaaaagtctttatatacttacaaaatataaaaattagaataagctctaaaaaataagaaataagtataaatttattctcacttgataaagaaaaaaatctaacttgattatttattattagaaataatataatcattgttatagctggatacaatgtattttcagtatggtttaaataacttataagtaatataaatagagataaatatcgtataaaaataaatgttttttttctgttcattaaagacattcctccataaaaataaactttcattataaaaactagcataatatcataaaagaataaagtcaatagaagtatttattaatatcaatggaaataaaatcaatttcaaaaaattgaatagttaaattgtatactgacgataatttaaaagtaaaaatttaatatattggagtagataatgaataataaagaaaaaggtgattttggagaagaaatagcagttaattatctgctatcaaaaggtgcaaagatactagaaaaaaattatagattaaggataggggaggtagatataatagcaaatataggagatgaagttgtatttgtggaggtgaaatcaaggtctaacataaagtatggctacccttgtgaatctgtagattttaaaaaaagaaaaaagataattggtgtcgcaaaatactatattataaaaaataacttaaataatactcccataagatttgacatcatagaggtctatttgttagaaaaaagaataaatcacataatgaatgctttttaaaaaagataatgtttttggaaaggattaaatatgttaagtattattaattcaagcaacttagtaggaatcgacagctttttagttaaggttgaagtagatgtaagcaatggaatacctagttttaatattgttggtcttccaggcaaagaaattaaagaagcaagagaaagagtaaagtcagcaattcttaatagtggatataaatttccaagcacgagaatagttgtaaatttatcaccagcagatataaaaaaagaaggagcttttttagatttatctataagtataggccttttaagagagttaataaaaaaagatgaaaattacataagagaaagtatgtttataggagaattatcattagatggaaaaataagaaaagtaagagggatattgcccataattatgggtgcaaaaactcagaacataaaacgtatttttataccaattgagaacataaaagaaagtctattagtagatgaaattgatataattcctattaaaagtttaaaagaatgtgtcgattttttaaacgaagagataaaagtcgataaagtaagtataatgtcttttttggatgataagtcaagaaaagagaacggagaattagaaaaagataatagttatatagattgcaaatatactaagattaataatgaagaaagtaaatatgatgaagactttaaagatgtaaaaggaaattattttgtaaagaggagtgcagaaattgcagcagctggaaatcataatatgtttatgattggacctccaggctcaggaaaaactatgattgcaaaaagagtaaggacaattttaccagatataagtatagaagaaatgatagaagtaagtaaggtttatagtatattgggtatgataaatgaaagtaaaggaataattgataaaagaccttttagagcacctcatcatacaactacaaagcaatctttaattggaggaggaatggatgcaagacctggagaaattgctttagcacatagaggtatcttatttttagatgagatagccgaatttgatagaaaaatacttgagactttaagacaacctatagaagatggatatgtaaatatatccagagtaaagtacagtgcaaaatatccttgtagagtactgttagttgcagctatgaatccatgtccatgtggttattatatgtcagagacagagtgtagatgtagaagtaacgaaattgatagatacataaataaaatatcaggtccattgttagataggtttgatatttttgtagaagttaattctataaaatattcagattttaattctttaaaacaagaagaaagctctcaaaaaataaagagaagagtagaaaatgctagaaaaatacagataaatagatttaagaaagataatataaaaaataatagtgaaattaaagcttacaatttatttaaatattgtaaactggaaaaagaagcttcaaaaacggctgagatgatatttaataaatacaacctaagcagtagaagttatacaaaacttttaaaaatggcaagaacaatagcagatttagaagaaagagacttgataaattcacagtgtattatagaagctttttcatttagaaaggcttattatagttattttaaatagttttttgaggtggattttatggaaaaaagagatacttatttatggttaaaatcaattggtggaataacaacaaaaacaattgaaataatagaaaatgaaatagtaaatattgaagatatatttgatttttctgaaaaagaaatatataatttaaaaaatataagcttgaatattagaaaaaatatagtaaaatatagaggttacgcttatttagaaaatataaaagaactactttacaaaaaagcgattaaatatatttgtaaatatgataaagaatatcctgaaaatttaaagaatatatacaacgctccaaagttattattctacaaaggtgacataggtttagttaataataattttaatatagctatagtaggttcaagaaaacctacagcctatggaattaattgtgcaaaaacaataagttgtcaactatcccaatatggagttaatatagtaagtggattagctataggaatagatgcatactcgcacataggttgtatgagtggaaaatctaaaactatagcagtacttggttcaggagtagacaatcctcttccaaaacaaaatttacatttatcaaataaaatattagaaaatgggggattattattatcagagtataatattaactcgacagtagccccgtaccatttttctaatagaaatagaattatcagtggtttaagtgatggagtagttgttgtagaagcagcaataaaaagtggtgcactaatcacagtagattttgctcttgaacatggaaaaaatgtttttgcaatacctggtaatataaattctcaaatgagtagaggttgtcataaaattataaaagaaggtgcaaaattaattgaaaatatagatgatattttaaatgaatataacatatttaatattattgataaaaaaataaatcaaaaatatgataatataagtctaaatgccaagtctaagcaaataattgaagctataaaaagagaaggaaacttgcatatagatagtatttgtgattatactggtatagaaataaagtatgtaaattcaataatcaatgaattagtactaaatgagttagtagtagaaatgaataataaaacgtacagtttaaatgtataaattaagattaggtagtgggggtgtatggttttatggccaaaacattagtcatcgtagaatcgcctgcaaaagctaaaactatagaaaaatttttagggaaaagtcattacacagttaaagcatcagttggtcatgtcagagatttacctaaaagtaaattaggtgtagatatagaaaataattttgaacctcaatatataaatataagaggaaaaggcgatgtaataaaagaattaaaaaaagaagctaaaaaatctaaacaagtatatctagcaactgaccctgatagagaaggtgaagctatatcatggcatttagctcatatactaaatttagatgaatctgaggattgtagaatagagtttaatgagataactaaggatgcaattaaaaaagcaattaaacatcctagaaatattgatataaatttggttgatgcacaacaggcaagaagagtgctagacagacttttaggttatcaaataagtcctatattatggcaaaaggttagaaaaggtcttagtgcaggtagagtgcaatctgttacaacaaagttaatttgtgatagagaaaaagaaataaaggcatttattccaaaagaatactggacaatagatgttgaggctaagacagtaaaagacaaagatataactttgaaattttatggtaaaaatgatgaaaagattgaattagaaaatgaagaagctgtaaatgaaatactaaaagaaatggaaggtaaagatttaaaggttgagaagatagaatctaaatcaagacgtaaatcagctccaaaaccatttacaacaagtatgcttcaacaagaaggagcaaataagttattttttactactaaaaaaacaatgatgatagcacaagaattatatgaaggtatcgacatagaaggtgaaggtactgttggtcttatatcatatataagaactgactctaaaagaatatctgatgaagcaaaagaaaaagctaagggttatatcgtaaacaatttaggagaaaactactataaaaacactggtgataaaaaagaaaaaaaggatactaaaaaggttcaagatgcccatgaggcaataagaccaacctcagttgatagaactccagagagtataaaagcctcattgagcaaagaccagtacaagttatacaatttaatttggagaagatttgtagctagtcaaatggaagattcagtgtttgatatactaaatgtagaatgtaaaataggcgatattgtatttaaggcaactggttcaaaaatgaaatttgatggttataccaaggtatataatttttcagaaagagaagacaaaattttaccaagtatagaaaaaggagatatattaaatatagaaaatatattgccagaccaacattttacacaaccaccagcaagatatacagaagctagtttagtaaaaacactagaagaactaggtataggtagaccaagtacgtatgctccaacaatagctactatactgaatagagagtatgttgaaaagcaaggaacaagtctatgtccaacagaacttggaataatagttactgatattttggaaaataatttccataaatttatagatgtagattttactgctgatatggaaagtaaacttgatgttatagaagaaggcaatacagattggaaaaagattgtatcagaatcatatgcaccacttaaagaggctattgaagaagctcttgaaaatatagaaaaagtaaatatggatgaagaaactgatgagatttgcgagaactgtgggtctaatatggttatcaaatatggtagatttggaaagtttatggcttgtaaaaactatcccgattgtaaaacaactagaccaattatgaataaaattggtgttaaatgtccaaaatgtgaagaaggagatattatacttagaaaatctaaaagaggtaaagctttttatgggtgttctaattatccaaactgtgactttgtagcttggaataagccaacaggagagttttgtgagaagtgtggttcatatatggttgaaaaagtgactaaatctgaaacaaaaacagtgtgttctaataaagaatgtaataaagagacaaaagagcataatgacggaaaagagtgaaaattgaaaaaaatcacataattctcttgaaaaaggttccaatctatgataatctttcaagtgtaaacaactaatagaaaaataaattttcattaaatgtgaaaataatattagaaaatataaaaggttattaaaaggcctaaatttcatgaggagatgattaaatggcaagtgaagtgttacaaaaaacaaggaaaataaataaaacattacaaacaagtggtggaagcagtgtctcttttgatttactggccggagcattgggcgacgttttaagttctaatgtttatgtagtaagtgcaaaaggtaaagtactaggtcttcatttaaatgatgttcaagacagttcagttatagaagatgagtatactaagcaaaagaaattttcagatgaatatactcaaaatgtgttaaaaattgatgaaacattagaaaatttaaatggtgagaagatattagaaatctttcctgaagaacatggaagattacaaaaatatactacagtagttccaatattaggaagcggtcaaagattaggaacattggtactttcaagatattcaaattcattcaatgatgatgatttagtaatagctgaatacagtgcaactgttgttggtcttgaaatattaagagcaataggtgaagaattagaagaagaaatgagaaagaaagctgtagttcaaatggcaataggcactctgtcctactccgagcttgaagcagttgaacatatttttgctgaattggatggaaaagaaggtctacttgtagcaagtaagatagctgatagagttggtataactaggtctgtaatagtaaatgcacttagaaaatttgagagtgcaggtgtgatagaatcaagatcattaggtatgaaaggtactcatataagaatacttaatgacaaacttacagatgaattaaaaaaattaaaaaacaatcaataatctatattttataggtttagattagaaaaggtatctatttcaaatagataccttttttagacgaattattaaggtaatgataagtatattaaaaaggagtgagaaaatgcctttagcagataaaataagaccaaaaacaatgaatgatgtaataggtcaaagtcatataataggtaatggaaaaatattgtctaagatattacaatctaattttttaccaaatatgatattttttggtcctcctggtgttggtaaaactacagtagcggaaataatagcagaaagaagcaataaaagcttctataaaataaatgctactaattcatctttagaagatataaaaaaggtgatatcagagcttggaagtataaataatgtaaatggagtcctattatatatagatgaaatacaaagttttaataaaaaacagcaacaatcaatattagaatttatggaaaatgggagtataactttgattgctagcactacagaaaatccatatcattatgtatataaagctcttttaagtaggtctactgtatttgaatttaaacctttagaaaaacttgatatagaaaaaggactgaaaagagctgttgaagtattaaatgaagatagctatatggatattgagtgcaataataatgctattgaagatatagcaattctttctgatggagatatgagaagagccttaaatattttggaagtggtagtctattcaactaaaccaaataaggataatataacttatatagattcagatgtaataagggcatctacatttaataaaattataaactatgacaaaaatggtgatagtcattatgatattttaagtgcatttcaaaaatctataagaggaagtgacccacaggcatctatacactatctagcaagacttataaaaggtggggatttgataagtatatgtaggagacttttagtaatagctagtgaagatataggtttagcttatccaaatgctattgtaattgtaaaggcatgtgtagactcagctatgcaacttggatttccagaagcgaaaataccattagcagaagctactattcttttggctacatctccaaagtctaattctgcatgtatagcaataatgaaagctatggatgaactggataaagagtttgttaaggatataccaaatagtataaaggatgctcactattctggttctaaagaaataggtaggggttgtggatacaaatatcctcataattttaaaaatcattatgtaaagcaacagtatttaccagatagcataaaagatagtatttattacataccacaagaaaataaaactgagaaaaatataaaaaaatatttagaatatctaaatagtgatttttagactgaattttatgtatcgggggtagatattatgattataaaacttaactcaacttatcacagtagagttatgaaatacttaaaaaaagaacctgagtacaatttgtttataataggggatattgaaagatatggatatggaaataattttttaaatatatgggcagacgtgggtgaacatggtgaaataaaggcaatattacttaaatattttgaatttatgatgttttattctgatggagagtatgatgttgaaggtttttataatctacttcgtaatactaattacgaagaaatatctgggaaaatatgtgctgtagatactttagcaaagagattaggacttaataatttaaaggtagttgatttttgcaaacttcaaactaaaaagtttttgatagataataattgtaatgcaaaggttaagagaattaggcttggaaatctaaaaaagacagtgaaactttatgacttaatagatgaatttcacagtacaactttagagaatttaaaaaatggactaaggacaggtagaggatattgtatagagattaacaaacaggtggtgtcaatggcaaagagtacttcagaaaataggactcatgcaatgataattggagtaggaacacatcctaaatatagagctaaaggacttgctacaaaatgcctaattaaactatgttcagagttactgagagaaaacaaaattccttgtttgttttatgataatgaagaggctggaaagatatataaaaaactaggatttgaaaacattggaaaatggggaatttattcaaaataaaaaattaaaattaatcttgacaaaattagtagggtataataaaattatcttgaaagtaattcctactaaaacagtatgaattagatttctatatagaggtgataatatatgaagttgtctactaaaggtagatatggactaaaagcaatgtttgaattagcattaaatcaagacaatggaccagtatcattaaaatttattgctaagaagcaaaaaatatcagatcagtacttagaacaaatattttcatctttaaaaaaatcgggtctagtaaaaagtgtgagaggtgctcaaggaggttatttgctttcaaagaatgctgaagacataacagtaggagatatacttgtagtattagaaggaccagttgcattatctgactgtgtactagatgaagatgtatgtgaaaactcaaacatgtgtgtaacaaaaatagtttgggaaaagatgaaaaagggtatagaagatgttatagattcaattactcttaaagatatgataaatgactataacaaaaataaattagaaaatgatataacaaatattaaaaaatagatttggagatgaatgtaatggaaaaaagaagattgtatatggattattctgcaacaacacctattaaaaaagaagtattggatgcaatgatgccatacctaacagattattttggtaatgcatctagttttcacacattcggaagagaagcaaaagatgctttggataaagcaagagaacaagtagcagcccttataaatgctgaacctagtgaaatatattttacagcaggtggttcagaaagtgataactggacactagagggtgtagcttatgctaataaaaacaaaggtaatcatataataacttcaaaaatagagcaccatgcaatacttcatacatgtgaatacttagcaaaacatcatggatttgaaataacttatttagatgttgatagcgaaggaagagtagacttaagacaactagaagattcaataaaagatactactatacttataagcataatgtttgcaaataatgaaataggaactatacagcctattaaagaaatatccgaaatagctaaaaaacataagatattattccacactgatgcagtacaagctacaggtaatattccagtagatgttaaagaattaggaatagatttgatgagtatgtcttcacataaaatatatggaccaaagggtgtaggagctttatacataagaaaaggtgtaagacttcataactttgtccatggtggagcacaagaaaaaagcaaaagagctggtacagaaaatatacctgcaatagttggatatggaaaagcagcagaattagctaaggaaaatatgcaaaatcatgtagaaactttaactcgtcttagaaataagttaatagatggtgtgttagaaagaataccttacacaagagtaaatggtagcttagaaaatagattgccaggaaatgcaaactttgcattccaatttatagaaggtgaaggaatacttttattattagatatgttaggaattgctggttcaagtggttctgcatgtacttctggttcattagacccttcacatgtacttcttgcaataggtttaccacatgaaatagcacatggttcattaagacttacagttggagattttacaacagatgatgatatagattatatactagagaacttaccaaaagtaatagaaagacttagaagcatgtcaccactttatgatgatgcgaagaaacaaggtttagtaaaatagacagaaagataaagcataaaaaatagacataaattgagtaggaggaaaagataatgcaatatagtgataaagttatggaacattttatgaatccaagaaatatgggagaaattgataatgcaagtggtgtaggtgaagttggaaaccctacatgtggagatataatgaagatatttttagacatagatggagatgtaataaaggatgttaagtttaaaacatttggctgtggttcagctatagcaagttcttctatggcaactgaaatgataaaaggaaaaactataaaagatgcattagaacttacaaataaagctgttgcagaagctttggatggtttaccaccagtaaagatgcattgttcagttttagttgaacaagctgtaaaagcagctcttatagattatgctcaaaagaacaatatccatataccagaattggatggatatgttatagatgatgctcatgaccatgatgttgaagaagaagaataaaaataagtgattgtgttatgagaagtttacaatgattaaaaagaagtactaatgatataattaggacataaaaaatagctgtttttaaaatggctattttttattgcctaaattaagtattttaacttgatttagaggttaattagttaacaaaataatccataagattcaaataataaagatgattatttttttagaaaatagaacaagctatattttaaataagtacaatacttgctctatatggtataataataagtaatgcaaaagatgaggtgaaatttgtttatgaataaaaaagtaatgataggtatgagtggaggagttgatagctctgtagctgcatatcttttaaaacaacaaggatatgatgtcattggtgttactatgaagttgtggcaagatgatgatgttgttgaaattgaaggtggttgttgctctttatctgctgttgaagatgctagaagggtagcaaataaaataggtataccattttatgttttaaattttagagaagtgtttaaagaaaaagtaatagattattttatagatgaatatttggaaggaaaaactcctaatccctgtatagcttgtaataaacatataaaatttgatgatttttataagaaggctagacaaataggttgtgattatgtagctacaggtcactatgcaaagatagaaaaggatgaaagtacaggaagatatttgctaaaaaaatctgttacagataaaaaagaccaaacttatgcactttataatcttacacaagagcaactagagcatactttattgccaataggtgactatgaaaaagatagagtaagagaaattgctaaggaaatggggatggcagtacacaataagcctgatagtcaagaaatttgttttgttaaagataatgactatgcaaattatgtaaaaaaacattctaaaaagcgtattgaagaaggtttttttgtagatactaaaggcaatatacttggaaaacataagggtatattatattatactataggccaaagaaaagggcttggaattacttttggaaaaccaatgtttgtaatagacataaatccaataaataataccatagttcttggagacaatgaagatttatttaaaaaggaacttattgctaaagatgttaactttatatcaatagatacgttagaagaacccttaagagttcaagccaaaataagatattcagcaaaaccatcaccagctactattcatagagtaggagaagatactattaaaatagtttttgatgaagctcaaagagctattactaaaggtcaatctgtagtaatgtatgatggagatattgtagtaggtggaggtataatcgagaaaagtttataaaaacatctaaaaaattaaaaaaataagcaataaagtatattaagagtaaataaagtttataaaataaatttattgtatattaaaatatagtattgattaattttgtaaaatttagtaatataattagtatattaattaaaaaacaaatacagtgataaggaatagtaaaatatttgatgtcttacagagagagggaaatgctggaagcccttagaatatgatatttgaagcagccttttagtagcaatcttgaacaatttatcttttataaagaagatttaagtagagattgacggtagttacgttatagctaaggttttccgaagatatcatactttgtatgataattagggtggtaccgcgattgtcctcgcccctataaatttatttatagggacgaggttttttatttaaacgaaaaaataaaatttattaggaggaacatgatatggaaaagatgggattaaatgaaataagaagtaagtttttagaattttttgagtcaaaaggtcattatgtagcaaatagttattctttagtaccaaacaatgataagagtttgttacttataaactcaggtatggcacctttgaaaaactacttttcaggtgtagaagtacctccaagtgtgagaatgtgtacatctcaaaaatgtataagaacaggagatatagaaaatgtaggtataactgcaagacatgctacattctttgaaatgatgggtaacttctcatttggagattactttaaaagagagtcaatcaaatggggatgggaatttgttacagaatggctaaatataccagaagataagatatgggtgactgtatatgaagaagatgatgattcttatgatatatgggcaaaagaaatgaatttcccagaagaaagaatggttagacttggaaaagatgataatttctgggaaataggtacaggtccttgtggtccttgttcagaaatatattttgatagaggagaagaatatggatgtgacaatccagactgtaaaccaggctgtgattgtgataggtatttagaattttggaaccatgtatttactcaatttgatagagatgaagaaggaaattatagtctattagaaaacaagaatatagatacaggtatgggtcttgaaagaatgggatgtattatgcaaggcgtagacactatctttgaagttgatacaattaaatctatactagaagcagttgagaagttaacaggagtaaaatatggagagaatccaaaaaatgatatatcaataagaataataactgaccacataagagctgtaacattcttagttagtgatggagtgcttccatcaaatgaaggaagaggatatgttcttagaagactccttagacgtgctgctcgtcatggtaagttattaggagtaaaagaattatttttacagaaactaatagatgaagttataaaggtaaatgataaagcatatccagttttagttgaaaaagaaagttatattaaaaaagtagttggaatagaagaagaaaaattcaatgaaactatagaccaaggaacagaaatattgaactcttatatagaagtattaaaaaatgaaggaaagactgtcctaagtggtcaagaagcttttaaactatatgatacttatggcttccctatagacttaactaaagaaatattagaagaagaacatctatctgtagatgaagaagcttttaatgaagaaatggaaaagcaaaaagaaagagctagaaatgctagaggaaatatggatggagaaagttggaaggaagaccctctatcaaaattagaatctacagttgacagtacatttaatgggtatagtgaaatttatggtgaaggaactattgaagctatagttaaagatgatgagctagttcaaagtgcagaagaaggcgataaggtatctatagtactagataacactactttctatcctgaaggtggaggacaagttggagattgtggattgataactaatgaaaacttagttttagaagtattaaatactaaaaaaggtgctaataatagtataaaacatataggtataataaaatcaggaagaataagtaatggggacaaagtaaagacactcgtagatagagaaactagaatgtcagctgcaagaaatcacagtgctacacatttacttcataaggcattaagagaagtattaggagaacatgttaatcaagctggttctttagtaactccagaaagacttagatttgatattactcactttgaagcgatatcaaatgaagaattaaaagtaatagaagaaaaagtaaataatgttattttatcatctttagacataaaatgtgatattatgaatataaaggaagctaaagaaaaaggagctacagcactatttggtgaaaaatatggtgatgaggtaagagtagtttctatgggagattattctacagaactttgtggaggaactcacttgacaaatacttctcaagtaggaatgttcaaaatattatctgaaggtggagtagcagcaggtgtaagaagaatagaagcaataacaggaaaagctgtttatgaatacctaaaagaaagagatggaattatctctgaagtttgtgtaaacttaaaatctaaagaagataatttaattcaaagaataagttctttattagaagaaaataaaaacttatctaaagaattgcatgatatgaaagctaagatgagtttacaatcagttgattctatttttgattctaaagttgaagtaaatggagttaatttgataactaataaatttgaaggtatggatatggatacactaagagaaacagcagataatctaagagataagcttggttctggtgtagtagtacttgcaaatgtagtagatgataaagttaactttgtagttactgccactaaagatgtattagataagggaatacattcaggtaatattgttagagaagttgcaaaaatagctggaggaaaaggtggaggaagacctaatatggcacaagcaggagctagtgatgtatctaaggttgaccaagctttaagctatgcaagtgaggttattaagacacaagttaaataacattcactcaaggaggtttttagtttggaaaaagatttagactacactatgaaatttgaaggaataccagaagataggatgagtgtaggagatactattgattttgtatataaagcattagttgaaaaaggatataaccctataaatcaaattatagggtatctcctttctggtgattctagctatataactagtcataaaaatgcaagagctataattaaaaaatttgaaagagatgagatacttgaagaagtaatcacgcactatctgaatagaaagtaggtcaaataaatgagaaaaaagattatgtcgttgtttgcaatagtcattatgatttttgtatcaactgctagctatggttttgctgaagaaaaaggcaaggtcatatttattgatatgaataggaccaatcttggaagtatgatgaatattccaatcttgaaaaatgagatagaaaagagaggctatgtagctctcatgaatataagaggggatcaaggtactgatgatagaaggtcttatgcaagtatgggtgcaggaacaagagctagtgtaactactgaagactatatcaattttcaaaaagtagaccaagatactgctaaagcttttgaagtcgcaacaggtcaaaaagctaaagaaataaatgatttaggcattaatagatctataaatgaaaatcttgagtatggagaatatggagcaaatttagggtcattaggaaaaactttatcagaaaatggtttaaagacatctgtaattggaaatgctgatataattgaaaataatcaattagttaaaaatagaaacttatgtttagtagctatggaccaatatggaaggattgattcaggtaatattgataatattaataagaaagattctaaaatgccatttggaatatctacagactacgataaattactagatgaaactaaaaaatcctataaaaatagtgatgctatatttgtagaacttggagatacatatagattagatatgtatagattaaatctaaatgataatacttatggtacaatgaagaaaaatattgtaaaaaatataaataaatatcttgaacaagtattttctatggttggagaaaatgacactgtttatatagcaagtgcatttccaagtgacctagattataagaataagagaagactttctccaataataaaatttagtggagaagggaaaggtctactggaatctgccacaacaagaaaggctggaattgttgccaatttagatgttggagtagatatactaggtacatttggtcttgaaaataaagagatggtaggtagaagttatactttagtaaataaagaggacaatgttggctatctaaaatcactttatgaaaggatagtgtctatatcttcaataaggtcaactattataaatggctttgtaggcgtaatatctgcttcttgggtaattgccatgtttgcgattttctttagaaattatatgccacataaagagcgtgtattcaaagtacttaaggagtttataaaattaggcataataatgccactatcatttatgttagctcctttgatgaattttaaaactccaatttcaatatctttgggaatatttgcgactacgctaatattatacttgttaggtagaaaattatttaaggacaatgatataaagcacatgggattttttgcaacacttactattttagtcatagttatagattctgtatttggaacatacttaatgcaaaataacataatgagttatgatgctgtcataggagctaggtactatggtgtaggaaatgaatatgaaggtgtaactatagcaagtgcagtatttggcttagcagtattattacattataagaaggtatctaaattacttgttgtaattttttcgttaataatacttataactagtgcatatccttcaatgggtgcaaatgttggtggagctatatcagaatgtgtagcatatttgttgtttataatgcttatatatgacattaaaatagattttaagaaagctgtattattagctgtttcagctgtagttgtcgtttttgcatttgcagctttagatatactttcaggtagtgaatctcatttaggtatgtttgtacagagaattttcctaaatggaccaggagagatattacaaacatttggaagaaaaattcaaatgaatatgcaactagcacagacaagtgtatgggtaaatattttacttgtaggaattggagtaattgcagtacttatatttaaaccatctagacactttagaaagataatgaataattttccaatcttgtttaaagggtttattgcatctatggttggttgtataattactcttttagttaatgattctggaatagttgctgcatctacagcatctatatatatacttataccactaataataataaatataaatatgataatatttgaaaaaaacaactaaaaaattttttactgttcatataggatttaaataaaaaatgcaatatgattattaatgtaaactggatgcttacataaaaaatcatattgcaatttttatgattgattatgcaaaattctatgaagcaggaagcctgtgaccttagttatgagaggttcagaatatgtatttaatctatagaatataaatagataaaggaggaactatgttagatggaagaataatgggtcttgatgttggtgataaaactattggagttgctgtgagtgatttgatgggattaactgcacaaggtgtaaaaacaataaaaagagttggcaagaaaaaagatattgaagagttaaaagcaataataaaagaaaaacaagtaaataaaattgtatcaggattaccaaaaaatatgaatggaactttaggtccacaaggagaaaaagtaatcaagttttgtgaattggtaaaagcagaaacaggtattgatgtagagttttgggatgagaggctttctacagtagcggcagagaggtctttattagaagcagatgttagtagacaaaaaagaaaaaaggttatagatatgttggcagcagtaataattttgcaaggatatttagattttaaaataaattcataaaagaactataaaattgaatacttatgatatataatataaataataaaaataaaaataaatttgaggtgaatgacattatggaagaaaatataataaatttaatagacgaaaatggcgttgaaagccaatttgaaataatattaacattagaagcagaaggaaaagagtatgcaatattaatgcctttagatgatgaagaagctgaagaagctttaatctttagaattgatgaggatgaagaaggtgaaatattaatacctttggaaagtgatgaagagtatgaaactgttgtagctgtgtatactgctataatggaagaagaaggtttaaattacgacgaagatgaatcaaatggacttaactagataagtaattaagtttgtatataaaaatcagatatttattatatttgctttaattaaaccttattaattgtaaaagcatttatagtatatatctgtttttttgttttttattaaaaataccaaaaaatttatgaattttggtgaataatatatcttttatgggtatatatttatattatgagaataaattaaatttatttaaatgtcttgacaaaaaatgaattatcaattacaatattatttaataaagattatcaattgaaaatagtaagggtgatgttatggcaaatacaatggatttattaaaagacaagttaaaagaaactggttttaagattacgccacaaagaagagcaatagttgaaatattgcttaaacatgaccattcacatctaagtagtgaggaaatctatgatttagttagggttgactgtcctgaaataggcttagctactgtatatagaacaatgcagctattggatgaaataggattaatatcaaaactaaacttagacgatggatgtataagatatgagattagtctacataaagaagactgtcataatcatcatcatcttatttgtaaaaattgtggaaagataatggaagctaaagaagaccttttagacaatatagaaaaagagatacaatcattgtacaaatttaaaatacttgatcatgatgttaaattttatggattatgtgacgagtgtaatggagtaagcgattcagaagaataaacttctattgcttaatgtcgatggaagaatagtatagaacttttatattctatgctattcttccattttttattataaaccatctacaaaatgcaaatatacagttttcaagatgcttatagttttaatattgaaaatataattaatcctataagtacaaaaatgaatgatttttctatgaaattactaaatggtcctccaacagttaaaaaacctaaagaaattttcttttcgcttagcggataaaaaattggtattccttgctttgtaaataaatctcctaaaaacatatgacttgcataaccaatcgtaccataaaaagataaattattaatattagtgattaattctatctgttttagtaaaaaatatactattatagttgcaaatatgctatgagaaaaacttctgtgctttaaccagggaaaaattgacaacattagacaaaaaattgtaaaatatatttcaacttctatgatgtataagcatatagctaatagtataaatattaatgatagaaaaacttttcttagaaatgtgtgggttagttttgcttcaataattataattgcaacaaatgtaattattgcgcttaaataaaaattatcatttatatttattgaaataaagaaaataataatattaacagcatatataaaaattctatatatgtatttggatacattgttttttagaatgaaatttgagaccatagaattagatttatccaaatcgggtagtacagcaaaagtagctgaaactaaaatatcaactaaagatataggaattttaaatattaaagatgtttggatagctgttaagattcctattgcacaatgagttttaccacgcataaatcctcctaaattatccgatattaaatcatataatatttagaggatatcaaaataaaataggtttgtcaaaataatacgttaaatgtattttaaatatagcttaaaatatgatacgaattatggtacaataagaataactggtagcgagtgcgtgatttgatattatttatgattgtagaacgtgttaaaaaattaaatagacagaaggagatgatgcaattgttcaaaaagaacaccaacaagataaaggtaatggccttgggtggacttaacgaagttggaaaaaatatgactgttgttgagtataaagatgaaataattgttatagatgctggacttagttttccagaggatgaaatgttaggagtagatatagttataccagatataacttatttagtaaaaaatagggataaaataaagggtatatttattacacatggacatgaagaccatataggagctcttccatatatattaaagaaaataaatgtacctgtatatggggcaagacttagtataggtcttatacaagtaaaacttaaagaacataaaatgaataatgttaagttaaatgttataggtcctagacaagttataaagcttgataatatggaagtagagtttttgaaaaataaccatagtataccagatgcttactctattgcaatacacacagaccaaggtataatataccacacaggagattttaagattgacttgactcctattgatggagatgttatggatatgcatagaatctgtgagttgagcaaaaaaggagttcttttaatgctggcagatagtactaatgcagaaaaaccaggatttactatgtctgaaaagactgttggggtaggtcttgacgaattatttgcaaaaggaaatggcagaagaattatagttgctacctttgcatccaacatacacagattacaacaaataataaatactgctgaaaagtttaatagaaaagttgctatatcaggtcgctcaatggtcaatgtagtcggagttgcaaaagaattaggatacctagatatttctgatgacatgcttatagatttaaatgatatatgtaagtatgaagatagtgaattagtgataataacaactggttcacaaggtgaacctatgtcagctcttgctagaatggctttttcagagcacaaaaaagtagaaataaagagtggcgatttagttataatatctgctcatccaataccaggaaatgaaaaattaatatcaagagtaatcaatttcttatttgaaaaaggagcagaagtagtatacagtgatatagctgatatacacgtttctggacatgcctgtcaagaagaattaaaacttatacatgcattagttagaccaaagttttttatgccagctcatggtgaatatagaatgttaaaaagacatgctgaaatagctgaacagcttggtatggataaagaaaatatttttgtcatgcaaacaggagatgttttagaattagataaaaactctgctaaggtagcaaaccgtatacaaacaggaaacatattagttgatggtctaggagtaggcgatgtaggtaatatagttttaagggatagaaagcatttatcagaagatggtcttatgatagttgtagttactatttccaaggatgagggtaaggtcttagcaggtccagatataatttccagaggattcgtatatgtaagagagtcagaagatttaatggatggagcaaaggatataattaagaatgttctaaatgaatgtgaagagaaaaatattaaagaatgggcttatttaaagaataatattaaagaaaacctaaaagaatatttatatcaaaaaactaaacgaaatccaatgatacttcctatcataatggaagtataatataaaaaaactataaatttgaaaattagacctcttgtaatttttaaagtaatatcaaaaatccaattgatattatcttaagaattacaagaggtctttttaatactcatttaaaaaaaatatatattacataaaataccaattataacaatcttttattagtaaaaactacttatatataaattttactgataggaggattcttatggatgatgtttcaagacaaaatgctataaaagctttaaaacaaacaaaaatggaaatagcaggagagtatggaatgaattatgaagatgcttttgaaataatagaaaatgcgtctaataaaggtgttttagaaggttactttaaaaagcttgaaaagaaaaaaaatttaggtcaaggtatatctaggcatttagaataaaaaaagttaaatgtgagaaaataagtttaaataaactttaagaggtgacatcgatgaaaaaattagctagtactgctttggctatattaattgcgcttactcctttaagcttttcttttgcaaataataaggaaaatgctgatgccaaccaactaaatatatcttcaaaatcagcaattttgatggatgttggtagtggacaaattttatatgaaaaggatgctcataaaaagcttcctcctgctagtgtaactaaggtaatgactatgctacttatagtagaagctttggattcaggcaagattaagcttgatgatgaagttcaagtaagtgaaactgcatctagtatgggtggtagtcaaatattcctagagccaggagaaactcaaaaggttgatacattattaaaaggtatagctgttgcttctgcaaatgatgcttgtgttgctatggctgaacacttagctggaagtgttgaaggatttgttgatagaatgaatgctaaagcaaaagagttaaatatgaatgatactcattttgcaaatacaaatggacttccagttgcaaaccactatacatctgctcatgatatagctttaatgtctagagaactattaaaacacgaaatgataagtaaatacttaactacatggatggataaggttgtagtagggaagaaacaagttacagtaggtcttgcaaatactaataaacttataaagcattatcaaggagcaactggtgttaaaactggttttactcaagaagcaaaatactgtttatcagcatctgcaaagagaggtaatactcatctagttgctgcaactttaggagcagagacttctccagaaagatttaatgatgcctctagccttttaaactatggatttgctaattatgaaagtgttaagttatgtagtaaaggtgataatatagcaacacttacattggataaggctgatgaaaacaaagttaaattggttgctaaagaagatttaaatgctcttattaaaaaaggaagctctaaagaatttgagaagaaaattgaaatagtaaaaaatcctaagatgccaattaaaaagggaactgttttaggaaaaataaagatatgtaaagataaaaaagtaataggcgaagtggaattgataaatactaaggatataaataaggcaagctatctacaaatgcttcaaagaataattgataatatgatataaataattatcagatgaaatataattataatacacaaagatatgattataatacacataaaaaatacccttatgtagttatttgccataggggtatttttatttaccatatagaagtattttataatcttatgatttttatagaaatatagaaaagtttatgtatcttaaaatatcatttgatttaatatcatatatagggttgtttaacaattatctaagtaaaggcatactaccagtaagtttattcactttctttttattcccataaattgctatcccaaaatactgtaactcatcttctggaacactagcaatcttttgtgtaaattcttcataaagattgcaactttgtgctacatctgaaaaatctacaacagttaaatcgttaaattccaaagtatataattttttacgtaaatcttttattatttctttgtttccttttaaaataggtacaggaatgtcaataattcctaagtggctattacctgttttgtcaattacatctggcccaacagtttctggggcatgttttcctagtgtaattcccattatagctgctgtattggatataattcccattggtaaattttcgtctattaccatgacacattttgaatttttattttccatttttatttctcctttttaccttatttaaagttgtttgaatcatcatttataaatatattttgatactgctttggtgtaagaccaataaaattcttaaaaaagtttgtaaagtgactttggtctacaaatcctgtttgtatcgcagcatctataggttctacgcctttttctaaaagctttttagctttgtttacccgtatattttctaggtatctatatggtgtaataccttttaatttcgtaaaattacgaagtagagagtacttattcatacctgctatagtgcttaattcgtcaagtactatatgttcagcataattattttctagataatcacatactgcttgaatttctatatttgtattttccaagttagattgcaaatttggctctgtatgttcttcaattaattgctcaattaggaagaaaaaaagctcttcctttttaaaatccaattcttcttccatgattatatagtgtaattcttgtagtagaggtactagctcactgcgaaatataacaggttgattaaattttggtaaataatttttacctgtaatttcaaagacggtttttttcattatttctggcttaatattgatacatctgtaatcaagtactttatcatctatttgttcacaagtatgactgtcaaaagggttaaaaagtagcaaatctccagtacttgtggtatactctttatttttacaagataaatatctttgacctttttctataaaaccaattacataatgttcatgaaaatggtttgggaatttttgcattatgcctttaaatctatatgcttcaatttttaattccctatcaaagcatactgtgcgttcttcttgtctcacttaggtaacctcctttcatgttatacaaagtgtaacacatatttttttatacttcttgtataatattgactaagagacaataatgtcaattcatgtcaatataatattacacttacagtaggtgtaattattatattttcacaatgaatatgatataataataaaagttataaaataaaaagcaaattttaattttatgcctagaagttaaaattattataatgtaaaataattttgattataagctatttaattgttataataatattaaaaatttaatttaggagatgtacattaatgttaagtatgaatataggagaaatagtagcaagtttagttggtatagctatggcaatatcaatacatgagtttggccatgcttattcagctcacttattgggagatgatacagctaaagcttatggtagaatgacattaaatcctgtaagacatgttgatccaataggtcttttggctatgtttatccttaagatagggtgggcaaagccagtaccagtaaatccaaataattttaaaaactataagataggaaacctgatagtttcacttgcaggcgttttttgtaatgttttgactgctatactgtgtgtaattatcaataagtatgtgcatatgtatgctataaatacaatagctggatatgtgcttatatatagtatgggatttgcagcttttaacttacttccgatacctccacttgatggatggggagttatatctacatttgtaccatataaatggaatgaatatttgtataaatttgaaagtatgagttatataattttattaattgctttatttactggtatatatcaaataatactatcaccaatatatacagtgttgctaaaaatagtatatttatttgtttaatataataaacagattaaagagggattgatatgaagtataatatacaattacaagtctatgagggaccattagatttactttatgatttaataacaaagcataaaatagatataaaggatatatctataatagatataactaagcagtatctaaattatttgaaaatgctagataaaatggatttagagataactagtgaatttataactatggcatcaaaacttttagagataaagtctaaatatctgctttataagcaaaaagatgaagaagaagacccaagaatagaacttatggaaaagttagaagaatatagaaagtttaaggtagcatcacaagatataaaagaaaatataacttatgttaatgagagattttatagaaataaagaagagataattattgatgacaatgtggatttagaagatatatcaattgaagcaataaaaaatatacttccatacatatttaaagttaaaacatcacagatagaaaatgctaatgatgagaaactagacaaaatagtaaggaagaagataatatctgtggaagaaaagatattgtatataagagatattataaaagataagattgaagttacttttacaaatattataaaatcatatgaaaatgatgaaataatagctacttttttatctatattagagcttataaaagaaaaagaaatagtagtagtacaagacatattttttgatgatattctaataagaaaaagttcggagtgttaaaatgaaaagagaagatataaagtatattatagaatctgttatgtttgcatatggggaaccaataagtataaaagaattaaactatataataaataaagaactttcatcaaaagaaatagagattatgttaaatttacttattgaggagtacagagaacaaaatagaggtattcaaataatcaagctagagaataagtaccaaatgtgtacaaataaagactatgcagaatatataaagaagattattgaaccaaagaaaaagaaaagtttgagccaagctacattagaaactcttactataattgcctacaaacaaccaataacaaaggtagaaatagaggatataagaggagtaaaatgtgataaggtattacaaactttgtttgaaaatgaacttataagagaagctggtagattgaataagatagggaaaccaataatttataaaacaacagatgaatttttaaagttgttgaatatagaaagtcttgaagaattgccgcctatagaaaattatcaagaagtggcaacaaatgaataaaaatataaaatcacaataatttagtatgtaattttaaattttaaaagatttaaaatgctctaagttgttgtgtttttttgtataaatataaaattataattctcttaaaataaatatggataattaagtataaatagtaattttttgatgataatataaacatggagcttaatgaattatttaattttaagtatttaataatagctgtaatttttattataagtgtaactatgttgattttaatatctcatataaacatcttaataatagctgatataaacaacaaagatatttgtttaaagcttaatataaaatacatgtttaatttaataaatataaatagacaactttatccagctgaaaatagtaaaaataatgataaaaaagaggggatgaagaataatatagattcaagtatattattagctgatgaccttttgagcatttatagattattaaaaaagataaaaatacatgaactttattcaaatattaattttggaactggaaatattggcttaacatcttctgtatatgtattgataaatactttgtatggaaatttatttaatatgattgatgcagaaaaaatgtatttaaatgtaaatccagattttacaaaagattatgttttaggaaatataaggatacatataaggccaagaataaaagctttatttaatattataataatgattaataaaattatgaataaaaataaaggaaataaggaaggtgatagtaatgagagcaacaggttcgatacaaagtcttatggaaacaactcttgaaacaattaaaggttctatagatgcaaatactattataggagaccctataaaaacagatactacagtggttgtacctatatcaaaggttacaattggctttggtataggaggaggagaatactcaaaaggatatgatgataaagatagggaaattgaattaaaaaatgaaaaatcagatacgaattttgctggaggtagcgcaggggctatatctgtacaaccagtagcatttgtagtagttgaaagtggagagactagaataatgagtttagacagtaatatcaatctagtggataatatattatctataactcctagagtattggagaaaattcaaaatatatcacaaagtaataagaatcaagataaaaacaatatgtaagaataaaatatttttaaatatgtatatagttttaagtaaagtagtggggttagtataaatcccactattttgttgtgtactttaaacatttatatctaataagattttagtttaaaacaatttaaatagataataaagttgatatatagtataattataaaaagaaaagaagtattatattatagatatataaacgcatttgagatataagagggagttataaatcattagttttgaggtgaatgttatgagcgataaagaattatctattttgttgttagaaagtatgaataattttcataatttaataaagattattaataacgaaagatataaaaaagataaggttcttacagaaagacagttctttgccttagtaaaaataagaaaacatgataaaatagagcttaaaaatctaagtagagatttacatgtatctacttctagtctgtgtatactacttaataaattggttgagcaagagtatgtatatagggaagaagatagtagagatagacgaaatactttttatggaataactaaaaatggagaaaagatattggataatgaaatactaaagtttgtatctataataagtgataaaatggattgcttagatatagataataaagataaattatttacttctttggaagagtctaaaaatataatagaacaattattttaaaaaggagaatttattatgaatataaagtattctaaagagatattaaaaagtttagaaaatgctataacagtagtagctctatttgagggagaagatgtttctacgacatttgataaaataaatatgataagcagaaattttaattctaaagaaaatagtatagatactgtaacattggttgaaaataacaacttggtaaatgtttgtcttgttggttttggtaagagagagttattgaatagagaaaaaattagaatcataggtggtaatttgtgtaaaaaattaaaaaatatattgaaaaatgaagcatataagagtagtgatgttaatgtacttaatcttaatttaaatagtgatgaaataggttcttttgtagaagggatattacttggaaattataagtttgataagtataagacaaaaagtaaggattttgaaagaaaagaagttgatactataactatatttactgaaaaagaagttgagtgtcaaatagaaaaggctaaaatattagctaattcaactataatagctagaaatctagttaatgaaccatcaaacgtaatatatccaaaaacattagcaatagaaacagttaaacttggtgcagagttcgggtttaatgttgatgtttatgaagaagaaaaaataaaggcattgggaatggatgcttttttcgccgtttcaagaggttcaatcaataaaccaagattcatagtaatgagatactttggagataaagaaagtacagatatattaggtctagtaggtaaaggattgacttatgatactggtggatattctttaaaatcaaatgcttctatgctagatatgaagacagatatggctggtgctgcgagtgttataggtgctatgtgtgctatatctcaaagtaaattaaagaaaaatgttatagcagtagtggctgcatgtgagaatgctttatcaggaggttcatacaaacctggagatataattagttctatggcaaagaaaactattgaagttttaaatacggatgccgaaggtagacttacattagctgatgcaatatactacattataaacaatgaaaaagtaacaaaggtagttgatgtagctacattaactggtgctgctttaacattgttaggaaatgttgcaactcctatagtaacaaataatgatgatttttattgtgaattagaaaaagctgccactttatcaggagaaagggtatggaagatgccaatttatgatgaatttaaagatatgataaaaggagaagaagcagaccttaaaaacactggtggtaaaaatgctggatgtataacagcaggagcttttattggtgaatttgttgggaatactccttggatacatatggatatagcggggacaagtacatcatcaaaatcaattggatacaaagcaaagggggctacaggagaacctgttagaacattatactatttggcagaaatctaaaaaacaattataaaatataatttataaagccacatggatatttttgtaatttaagattatctatgtggctttattttttatttaagtaaattatttactctttttctttttctcaagtataaaagtatctctattaaataaaagagcaggtatgtacataatactagtaacaaaaataaacgtaaaaatagcagttgtgctatgacttaaaaaaccataatagtattgtgagttggtaaatgtgtttagtaaaaatatgaatgaaaaataaataaaacatatagctaagttatctctaagtgcatatctgttaactctaaattttctaacatcaaccatatatatatctgcataaattatcaagcacttagagaagataaatataaaatatattaagctaggaaattcatagcccaagtttttagaaaaaatgagttctccaactgaacaaactaaactccaagaaaaaaatatattaaaaagatgatactgcttaaaaattagtatggctatacacagatatatacagatataattgattccaattggtaaagagtttagagtactataattacctgaagaaataagtaataattgctctagagccataattattacaagtaatgtacaaattatcttctcaactgtatagctataaggtaaaatatttttggttagttttggacaatagtataaaaataatccaaatataaagagacttacaaattgttcactagaaaaaagaaaaattttaaacatataacattctctcctataataaatttaatatgtatctatataaatatattcattatatctcaatttaatatataaaaaagataataatagttagactttttatatgaattttaataggtaaaatatcctattgttttgtagatatatcctaattatgtcaaaaaataaaaaaatttttatttattagagtttttggaaataataataacagatattataattaattaacagtttttgtaagtatttgacaatagagagggtgtaacaaatgggaataatagagtcagcatcaaaattggctgagatggttcatttattggctgttgaaaaggggataactgatatagaagcatgggatgaagctgtgaaagaatacagcaaaatttatgaagaaagaagaaatgaatagaatgataaaaaatgaaaacttgatgataaaaaataactttatttaaagaaattcaatttttatagaaatattaaaaataatataaataaaaagatggtatttcaaatgtaagtaaaaaatcattttgggataccatccttattatttattttaataatatataagtaataaatcttacttatccatattttttatgtaacctcttttttctagcttttttatatgctccttacgtatttcatcaagattaataccatattgttcttctagcttaaacatcatagtaacacatgtctgagctacatccattagttccttagcagttttctttataatatcaacttcatctaaatcattattttctccacttagatttctgaatttacctatacattcagctaattcaccttgttcttcacccattttgataaatgtagattctagtgttgggtctaaattattaagctctggtaaagatatagtttttagtttcataaaagctcctttcaagttattcgtatttatactaaaacatcataacaaaaataatactaaaaaaaaactttaaattcaacataaaaacttacatatataataaaaatcgtgaaataaatctatatttgtcttaatacagcctcatataaaacttctccaataggtttatttattacaagagaagctgacttatcatagactgtatttgctttattaataagagcaatataatcacctttgtaataatctataaaacttgctgctgggtacacagctaatgatgtacctcctataatcaataaatcagcattacttatagcagaaattgttttagtaatgacatcactgtcaagagcttcctcataaagtactacatctggttttactatagaaccacagttgtcacaataaggaatattacctcccagatttaacatagattctaagtcaaaaaacttaccacatttagtacaataatttctatgtacagaaccatgaagttctagcacatttttacttccagccatttgatgaagtccatcaatattttgagttatgacagctttaagcttacccatttcctcgagttttgctaaagctatatgagcattgttgggttttgcattaggatatattaatttatccttataaaattcaaaaaattcttctggatatctaacaaaaaaagtatgtgaaactaattgttcagcagtaaattgtttattgagtttttggctaaataatccagtagaacttctaaagtctggaatattagattcagttgaaacacctgctccaccaaaaaatacaatattattgtgattagctattaagtcttttaagctatttgcatccatagttacacctccaaattattatatataaattgtactacatattaggtcttttatgttttattaatttaaataaatatgtagtttaataagttaaataaagggaatataaataaaatgtatacagagtataaatagacaatatttactaaaataacaagttgtcgtataattatattaaaattgttttagtgtataagaagggcgggggaagtacgtgaagaaaaaagcagctttagcaacattggctatgttacccttaggtgtggtaaatgcacatgctgatggagatataggtatagtgactataaattatttaaatgtaagaaatgagccaactgccgaaagtagcatagcctttgttgctaaaaaagatgataaagttttgattaaagactcttctaatggatggtataaaataaaagctgaatctggacaagaaggttgggcttcatcaaaatatatagcaaaatcaaatagtgactctttaagaacgtctacaaataaagaaaaacaagttatttcaaatagtttaaatatgagaaatggagcaggtacaagttacagagtaataactgtactaaaaaaaggtcaaaaagtagaagtaatatcagagagtaatggatggtctaaaatcaaatatgatggaagactaggatatgtatctagctcttatttaggagacgtttcaaattcaactaataaatcaaaaactaaacaagtgaatacaacttcactaaatgtaaggagtggaccaaatacaagttatggtttgttaggcaagttgccaaaaggaagtaaagtagaagtaatatcagaaagtaatggatggtccaaaataaagtataatggaaaagatgcctatatatctagtatgtacttatcggatgtaagtcaaagtaattcagacaattctagtcaaagcaatgataaaaagaatactgataaggttgtaaatacagcttctttaaatgtaagaagtggaccaggttctacatatagtaagttgggaaaagtttataaaggaagtaaagtaactgtactatcagaaagtagtggatgggctaagattaattttaacaataaagaagcatttgtagtaggcaattatttatctacttcagcagatacttcaaataataactcaaatagtaactctgataacagttctaatagtaatggcaataattcttcatcatcaggtcaagtaaatggtatgtcaggtataagtggggctaaaattgattataaatctttgagttatactttagaatctcatataagtaaacaagttgagaaagcagcatcaggaggaaatgtgatagctccaagtaataggaaaagcactccaagtcctgaatttagtactttttcagctcaaagaacaagctcatttgtaaatgcaagttcaagtgatatagaatattatttaaatcctaaaaattttacaaatactactaaaggtatgatgcagtttttaaagattaacagttatagagatggtatttcagaatcaagtcttaactcgtatcttaatggtttatcttctagtgtatttaaaaaccagggagcagcctttataaatgctgccaagaagtataatatagatgttgtatatctagtatctcatgctatgtgggaaactgcttatggtaagtctacacttgcccaaggtcaaacattaacatcttataagggacaacctcttagtaagccagttaaagtatacaatttttttggtataggagcaatagataaaagtgctaatgtttcaggtgcagaagcagcgtattccaatggctggactagtgtagaagctacaatagatggctctgcaaagtggatatcacaaaattacgtaaatagttctaagtacaatcagaatactatctacaagatgaagtggaattatgattatacatggcatcagtatgcaactgatgtaaactgggctaatggaatttctggaattatggaaaatttaattggtctttatggaggaggaagtagtttggtttttgaagttcctcaatataagtaatacataaataaaaaatatagactatgggtagttttcattttatttaaattatctatagtctttttgtatataatttataatctgtaaatttaatgttaacaaaacttttatgttataatattaattctaagtaaatataagtgagtaataggtagaaatagataaaaagtggtaataatatatataaagataattttgagaaaggaggatatatatggaaagtattaaggaatatttggataagttagaaattaataatagtggtcttggaaagcaacttaaagaagtttatataaatagagtagtttattttaaggaagataagatagtttatttttatctaacttctaaagatattgtttctcatgaacttttagataaatttaaagaagaattgatgtataaactcgattattttaaagatatgaggatgaagataagatttactggtcttgaaagaaaatccaataaagatgttataaaaaaatattggaataatatattgtatatattaaagtatctttgtccatctattgcagggtggtataaacaagtagaatttctttgtttagaagaagaattaaaaataaaacttccaaaaggtatattttatgagcgattaatgaaaaaaaatgtaacttatgtacttaaaaccgtgcttagcgaagagttgggattagatttaaatataacaatagaaaaagctgttgatgaaaaggtaaataaagaaagactcataagaatcaatgatagagaaatggaagaaaaaattagggctttagaaattggaaaagttaataactgtgaagaaaatgaagaggaaagctatgtcattaagtctgatgtagatgaaaatttaatctatggagataatgcaaatgctatgattgaaaatatagttgaattaaatgcatcttctggaacagttgcagttgttggagatatatttgatgttgacactaaagaacttaaaaacggaaaaatacttatgatagcttcaattacagattatactagctcaataagctgtaaactttttttaacagatacaaataaggatggagtacttgaaaatgttaaaaagggagcatacttaaaaatcaagggtgacatagtttatgatacatatcaaagagaaattagtatgatgattagtgggataagaaaagaaactagaatagagagagaagataaatcagaggaaaaaagggtagaactccatgcacatacacaaatgtcttctatggatgctatttgttctgttaaaaagcttgtagagcgtgcagccaaatggggtcattctgctattgctataacagaccatggtgttgtacaaggatttccagatgctatgaatgcaggtaagtcaaataatataaaaatactttatggagtagaagggtacttggttgaagatgattctctcattatagaggatgcaaatgataaagaactttcgcagacatttgttgtatttgacatagagacaactggtttttctaatacaaatgataaaataactgagattggtgctgtaaaaatagaaaactttaagattgtagatagatttagtgagttaataaatcctgaaaaagatatttcctataagatacaggaattgacaggaataactaatgaattaattaaagacaagccaaccattgaagaaattcttcctaagtttatggaatttgttggagatagtgtattagtagcacataatgcagagtttgataccggatttatatcgcaaaaatgtagggaacaaggcttgttatataataacaaaaaagtagatacacttatgttagcaagagtaatgttgccaaacttaaaaagacatagattaaatgtcgttgcaaaagaacttggtattcctcttttaaatcaccatagagcagtggatgatgctgaggctacagcacttatatttaataagtttttgcagatgcttacagaaaaaggtgcaaaaactctaagtgatgtaaacaatatacttggaaagattgattacacaaagcttagcacaaatcatataaccttgatagcaaaaaattctataggtataaaaaatttatataaaataatttcagatgcacatgtaaatcatttttttagagcaccaagaatccttagaagtgtattaaatgaatataaagaaggattaataattggttcggcttgtgaagctggggtggtttttcaagctgtaaagaaaaacgtgtctgatgaggaaatgaaaaaaataatagatttatacgattatattgaagtaatgcctatagataataatagatttatgattgataaaggagaagtaaaggatgaagaagagttaagggagttgaataggaaattaattgatacagccaaaaaatttgacaaaattccagtagctactggggatgttcattttttagacaaacatgaagctgtcttaagaaaagttcttaaatattctcaaggttttaaagtagatgaagaagaaacttatttacattttagaacaacagatgaaatgttggaagagtttagttatcttggagaagaattggcatatgaagttgtagttgaaaatagtaatctgattgccgatatggttgaagatataaaacctataccagatgatacttatcctccaattatagagggctcagatgtggagttaagagaaatgtgttacaaaaaagccaaacgaatctatggagacccaataccagaaatagttcaaaaaagactggatagagaattaaattcaataataagcaatgggtatgcagttatgtatattatagctcaaaaactggttgcaaaatctctttcagatggatatttagttggttcaagaggctcagttggctcatcttttgcagctactatgagtgatataacagaagttaatcctcttccagcacattatatttgtgaaaacgaagactgtaaatattcattcttttatgaaataggtgaatggggctcaggtgttgatttaccagacaaggattgtccaaagtgtggaagaaaacttgctaaaaacggtcatgatattccatttgaggttttcttaggttttgaaggtgataaggaaccagatatagacttaaatttctcaggaaattatcagccaacaattcataaatacacagaagaactatttggagaggggtatgtatatagggctgggactataggtactgtagcagaaaaaacagcttttggatacgcaagaaaatatgtggaagaaaataatataagtgtaccaaatgcagaagtacttaggctttcaaatggatgtactggagtaaaaagaacctcaggacaacatcctggtggagttatggttataccagactataaagatgtatacgattttacacctatacagtatccagcaaatgatacttcttgtggtgttataactactcactttgattatcattcaataagtggtagaatacttaaacttgatatacttggacacgacggtcctaccattataaggatgcttgaagatatgactggaataaatataacagaaattcctttagatgataaagagactatgtctctatttacatctacagaagcattaggtgttacaccagaagaaataaactgtcctataggttgccttgctgtaccagagtttggaactaagtttgtacgacagatgttacttgacaccaaacccactacatttgcagaacttgtgcgtatatctggtctctctcatgggacagatgtttgggtaaataatgcacaagacttagttagagaagatatagttggattaaaagatgttatatctacacgagatgacataatgaactatttaatatttaaaggattacctcccaaaatgagttttacaataatggagagcgtaagaaaaggtaaaggtctaaaaccagaacacattgaagaaatgaaaaaaaataatgttccagaatggtatataggctcatgtaaaaagattaagtacatgttcccaaaagcacatgctgttgcttatgtaatgacatcatttagaattgcatattgtaaagttcactatccagaagcattttatgcgacttattttacgacaaaagttgaggattttgatgcagatttaattgttaaaggattagatgctataaaatcaaaaataaatgaaattgagtcactgggaaatgatgcaaccacaaaagaaaaaggtatgttgaccgttttagaagttgctcttgaaatgtatgctagaggaataaaattattaccagttgatatatataaatcagatgcaactgagtttatagttgtaggagaaaaaacattacttccaccaatggcagcaatacaagggcttggaggaaatgcggctataaacatccaaaatgaaagaaaaaatggtgaatttatatcaaaagaagatttgagaaagagaacaaaaatatcaaaaacggtaatagaaactcttactaatcatggttcacttgagaatatgagtgagagaaatcaattgtcattgttttaagttagcccaaaaagttgcaaataaaagaattttatgatatcatagtatagaaaatagtatactttgcagaaactaagagtgagacagctgttctcactcttttattttaaatatattattaaaaagttggtttatttttattaaatatattttatttaagattatataaactaatcatttacaattgaataggaggaactttaatgaaaaaaaatttagaagctacaattgaggagattgtaactaaaataacggatgaacatggatttgaaatggttgatgttgaatatgtaaaagaagcaggagaatactacttaagagtatacatagataaagaagaaggaatatctttaaatgaatgtgaattagttagtagagaattaagtccaatactagatgaaaaagaccctataaaagaaaattactttttagaggtatcttctccaggacttgatagagcattaaaaaaagacagagattttgttagatatcaaggtagagatgtagatttaaaattatataaaccattaaatggatgtaagcaatttgaaggtgaacttgtaggattaacagaagataataatataaaaatcattgcaaatggtaaggaaatggaatttaatagaaaagatgttgctattgtcagattagcaataaagttttagtggtatattaaatagggaggatataaaaaatgaatcatgaatttatggaagcattagatgaattagtagttgacagaggtatagataaagaaatacttatagatactatagaacaagctcttttaactgcatacaagaaaaactttggttcagcacaaaatgttagagttgaatttgatagagacaagggagatataaaagtattttctcaaagagttgttgttgatgaatcagatttatatgatactttcttagaaatagagttagcggatgctagagagataaaccctaattatgaattaggtgatattatagaacatgaagttacacctaaaaactttggaagaattgcagctcaaacagcaaagcaagtagttgttcaaagaataagggaagctgagagagaaatagtgtataatgaatttatagaaaaagaaaatgaaatagttacaggagaggttgctagagcaaataaaaatgttgtttatgtaaatcttggaagaatagaaggtataatgactcaaagtgaacaaataccatttgagaattataaagcaggtcaaaaaataaaattctatatacttgaagttaaaaagactaacaaaggacctcaaatagttgtatcaagaagtcatccgggtctagtaaagagattgtttgaagaagaagttcctgaaatatatgaaggaatagttcaaataaaatctgtagcaagagaagcagggtcaagaactaaaatggcagtaaaatctatagatgaaaaaatagacccaattggagcttgtgttggaccaaaaggacttagagtaaaaaatatagtggatgaacttggcgatgagaaaatagatataataaaatatagtgaagacccagcagagtttatatcagcagcacttagcccatcaaaagttgttagagtagatatagatgaagatgaaaagtctgccttagtaatcgttccagattatcagttatcgcttgctataggtaaagaaggtcaaaatgcaagactagcagcaaaattgactaactggaaaatagatattaagagcgaatctcaagcagaacaagaaatgttaaatcttgaaaattccaaagaaatagaagctgaggatgttgaagctgaatttatcgaccaagaagagttaggtacttcagaggataattttagtgaagaagagtaaggagggatgattttgaaaaaagtaaaaaaagtgcctcaaagaaaatgcatagcatgtcaagatagagactctaaaaaagagcttataagaatagttaaaaataaagaaggaaaaatatttttagacccaacaggaagagccaatggaagaggagcatatgtatgtaaaagctctgaatgtctaaaaaaagctataaagagtaaagcattaaataaagcttttaaaatagatgttccagatgaagtctatgataatctacttatggagttagaagaatatgaaaaataataaagaaaaagtactttcgttcttagggctcgcaactcgtgcagggaaaatagtgtctggtgatgattcaactttgcttgaccttaaaaaaggaaaagtaaatttgattttaatcgcagaagatgcatcaaataatactaaaaaactttttaaagataaatcaacttttagaaatattccatatctatttttttcaacaaaagaggaaataggatttgcaataggaaaatctccaagagcagttgtaggaataaaagatgaaaatttttctaaaaagataattgaactaatagaaatttaaaataaaatagggggtgatcttgtgtcaaaaacaagagtataccaaatagcagaagaattaaatatatcaaatgaagagcttataaataagttagctgaattagatataaatgtaactgacaaagattcagtattagaaggtgaagagttagaattagcacttgaaatgttaggtgaagatttatctcaagaaaatggaaatgttatagaaatagatggaaagttgacagtacaagtattagcaacgaaattagataaatctccatcagaaataattatgaagcttatgaaaatgggaactatggcaacaataaatcaagagataagttttgagattgctgctttggctgccaaagactatggatttgaattaacagtagctgaaagtgatgatacagaagctttagaaatagaagctttaatggaaattgaagaagataaagaagaggatttaaaacctagaccaccagttgttacagttatgggacatgttgaccatggtaagacatctttactagatgcaataagaaaaactgatgtgatttcaggtgaagctggaggaataactcagcatataggtgcttcagaagttaaaatcaatggacacaaaatagtatttttagatactccaggacatgaggctttcacatcaatgagagcaagaggagcacaagttacagatatagcaatattagtagttgcagcagatgatggtataatgcctcaaacagttgaagctataaaccatgctaaagcagcaggtgtacctttaatagttgctattaataaaatagataaaccaggtgcaaacccagataaggttaaacaggaattagcagaccaaggattattagttgaagactggggtggagaagtaatagcagttccagtatcagctaagaaaaaagaaggaatagatacacttttagaaatggtattattggttgctgaaatggaagagttaagagctaatccaaataaaagagcagtaggaactgttatagaagctgagcttgataaaggaagagggccagttgcaacagtacttgttcaaggtggtactttaacagtaggtgacccaatcgttgcaggtgttgcatgtggtaaagttagagcaatgataaatgcaaaaggtaagagagtaaaaacagcaggaccatctacagcagttgagatattaggtctatcagaagttccacaaggaggagaccaatttgtcgaagttccaactgataagattgctagaagtgtagcagcaagaagacaacaaatagttagagatgaaatgttaaaatcaactcaaagattatcactagatgctctatttagtcaaatgagtgaaggttctataaaagaccttaatatagttataaaagcagatgtacaaggttcagtacaggcagttaaacaatctttagaaaaattatcaaatgaagaagttcaagttaaagtaatacatggtggtgttggagctgtaacagaatcagacatattacttgcagcagcttctaacgcaataataataggattcaatgtaagaccagttccaggtgcagaatctctaggagaaaaagaaaatgttgatataagaacatatactataatatacaaggcaatagaagatatacaagcggctatgactggtatgttagaccctgaatatgttgatgaagaaacaggaaaagctgaaataagagaaatatataaaatatctggtgttggaacagtagctggatgttatgtgactaatggtaagatatttagaaattgtaaagtaagattagttagagatagcataataatacatgaaggtgagcttgcagcacttaagagatttaaagatgatgtaaaagaagttaattctggatacgaatgtggtatgagttttgtaaattataacgacataaaagaaggcgatatagtagaagcttatataactaaagaagtagaaagaaaattataaattcgtatcaaagaaaatcagttagtaaagaaggtcgatggtatggcatcatataatagaacaagaaggatagcagaagaaataagaaaagtcgtaagtactatgcttataaatggagtaaaagaccctagaataacatctatggtgagtgtaactgatgtagaagttacaaatgacctaagatatgcttatgtatatgtaagtattctaggtggagatgaagaatccacactaacaggtcttaaaagtgctggaggatatataagaagagaagtaggaaaaaatataaaacttagatatattcctgagatagtatttaaacttgatgattcaatagaaaaaggaatgtatatggataaccttataaaaagagttaatgaaaaaaatgctcaacaaaatgaggatgaaaattatgatgaataatatggatagtattataaactatatttatgagggtgactattttatagttacctctcatatcagtccagatggagacaatgttggttctacactttcaatgtattatacattgaagaatttaggaaaaaatgtatattatgtacttgatgatgaagctccattaaatttaaggtttttggttgaaggtgtaaaaatctataagtctaatgaatttaatatgaagaactattctttaattgcacttgattgtggggataagatgagaatatgtgtgagtgatgaaatcaaaaataatgcatcaaaattaatctgtattgaccatcatgctagtaatgattcatatggagatttaaattatgtagatattgatgcatcttctacatgtgaactagtttataatttattggttagatttcagcaaacaaaagatattaatattataaatgaagatatagcaacatgtttatatacaggtcttgtaactgatactggaaacttttcgtattcaaatgtacatgcaagtagttttgaaatggcaaaaaatttacttgttttaggtgcacaaaaaaatactataatacaaaatatatatcaaagcaattcttctgattattataaattattaggagaagctctaaaaggtttggagatatttgattcaaaggtatctagtatagttttaactcaagacatgatgaatagaaataatattagctttaatgatgttgatggaataacaacatatacaagagatataaaaggtatagaagttggaattttatttaaagagaaaaaacaaaatgaaattaaagtgagttttaggtcaaaaaattatgttgatgtaagtgaaatagccaagttatttggcggtggtggtcatgtaagggctgctggatgtactattagagatagtattgataatgcaaagaaaatggtactagaggcagtgttaaaatcaatttaaggtgacagtaaaatgaataagattataagtatattgaaacccacaggtatgacatctcatgatgttgtaagtagagtgagaaagattttaaatataaaaaaagttggtcatacaggtactcttgacccagatgcttcaggtgttttaccaatctgtatagggaaagctacaaaagtatgtgaagttattttaaacaaagataaatcgtatatatgtgagcttactttaggtataagtacagatacttatgatgcttcaggtgaaattttaaaaaaagttgatgattttaaatttagtaatgaagacatagaaagagcttttgatacacaaagaggagagataaatcaacttcctccaatttattcagctttaaaggtaaatggaaagagaatgtgtgatttagtaagaagtggtagacaatctgaaattactttaaaaacaagaagagtaaatataaaagacataaaaatactaagtataaaaggtaataaagtaatgttttatgttgagtgttctaaagggacttatgtgagaagtatttgccatgatataggagaatatctgggttgtggagctcatatgtcgtttttgaatagaacatcttctggtaaatttgacttagataattcaataacattagaagaattagaattattttatgaaaataaaactttagacaaatacttatatgatatagattatgtccttgattcgtttaattatgttgtattaaaccctaatgctataaaatattatagtaatggtggctcaatagatgataaaaggtttttaaaaaataatttcgataaagatgatgaagttgtaagagtatacagtacagataatttcttaggattaggaaagttatcaaaacacaataatacaataagtgttaaaagtgataagatgttcatataaccaatgtatttaaaaaaacaacaaaagagatagtactataataacttctatagtctatctcttttacttatgctataatagtttgtgaataagttaagagtaaattatattttagcggggaacatttattatggtgattataaaatctataaaagaaatagcaaacataaaagaaagtgtcattaccataggaaattttgatggtgtacacaaaggacatcaagttcttataggaaaaacagttgaatatgcaaaaaaagaaaatatacagagtattgtatttacatttgcaaatcatcctgtaaattactttagaccaaactcaacaaaaaatattataagcaatgatgataaaataaaattattagaagatttgggaatagatatagttgtaatcataccatttgatgagtatatgactaaaatacctgcaaaggatttcgtagatgagatactagtaaaaaaattaaaagctaaaaagatagtaattggacatgactttacatttgcaagggcaaaagaaggcaatgttaatctattaaaaagcttagaacatgaatttggttttgaggtagaagtaataaaacccatcaaaatcaatgatgtaagagtgagtagtacttatattagaagtttagtatcccagggtgatatggctaatgtcaaggaatatttgggtagaaattacaagttagaaggttgtgttatacattctaaacaccttggaagaactataggattcccaacggcaaatattgaccttaagaataatatgctcgttccaaagagaggtatttatgcttctattgtacatattggagatgagacttattttggtgctacaaatgtaggctataacccaacagttaatggaaaaactttgtctattgaaacaaatattttagagtttgatagagatatttatggggaaaatataattgttgaatttttggaaagaataagagatgaaagaaagtttaattcaatagatgacttaaaaaatcaattgtataatgatacaaattatgtgtatgaaaactatgtttgcaaaaacaagtaatgtatgataaaatgattaaggaaaataaccattactcggcatttgaatactccaatcaatgcttagtaataggcgtttctaaaaaaatacggaggtaatctaaatgataaacaaatcagaaataataaaagaatatggaagagctgaaggggatactggttctccagaagtacaaatagctttattaacagctagaataaacgagttaaatggacatttaaaaactcataagaaagaccaccattcaagaagaggactattaaaaatggttggtagaagaagaaacttattagcttacttaaaggaaaaagatcttgaaggatatagagcattaatagctaaattaggattaagaaagtaatttcattctttataaaaaagcaggtatagtgtatacctgcttttttatagttaattcattataaagtaaaatagttaataataaaagtagtttatatgttataaaaaattataaaatgaataatattgggtaagaatattaaaatagtatacaaatacataatcaatttaaaaggaaagacaggataaatatagaaattttataacaggataattagttggaataaggaggatattattttgaaaataaagttagtatgcgatagtttgtgcgatattccagatgaaatatcagaaaaagattatatagagatagttccacttacagttatttttaatgatagggaatatatagaaggagtagatataaagaaagaagagttttataaaaaagtaaaagaaatcaagcaaatacctaaaacttcacaagctacatatatggagtttaaagaagtgtttgataagttcataacagaaggttatcatataatctgtatgacaggggctgcaaacgcatcaggaacttttcaaagtgctatgatagctaaaaatgatgtaaatgaaaatgaaaaaatacatatatttgatactagaaatttatctctaggtagtggacaatatgttataaaggcatgtgaacttcttgaagaaggactgggatttgaagaaattatagatgaattagaaaatactcgcagtagtgtaagattactttttgcaccatatacacttgattttttaaagcagagtggaagagttccagttgcaactgctttgataggaaatatgttaaatataaagcctatatttttctttgataatggggaagctaagttggtaaataaggttagaggaataaagaatatagcaagtaaactggtcgatataattttagaaatgaatgaagggtctttagaaggaaaaatcgtcacaataggttgtggagataatttacacgattgtgaaatattaaaagatgaagtaaataaaagaataaaagcaagaagagtattatttactcgaggaggagtttctatttgctctcatacagggccagatatattggctataagttgttctaattagtagtaatataaggtttttgcatatatatgtgaagataattttatattgttaatttatagtatttttgataatatagtaaatagagtgatatacgtgttttttaataagaggaggacaagcattaatgtttgaacataaaatatttaaaatggattttgcaggaagagaactttctgtagaaataggaaagatttgtgaaatggctagtggtagttgtatagttcgatacagtgacagtatggtaatggtaaatacaactaaatcagccaaacctagagacggaatagacttttttcctttaagtgtggattatgaagaaaaattatactctgtaggtaagatacctggaggttttttaaagagagaagggaagccttcagaaaaagctatacttacatcaagattgatagatagaccaataagacctttattcccaaaaggatttagaaatgatgttcaggtagttgcaacagttctatcagtagaccaagattgtacaccagatatagtagcaatgataggttcttcaatagccctttctatatcagacataccatttaatggaccaacaggttcagtatgtgttggccttgtagatggtgcatttgttgtaaatccaaacgcagagcaaagagaaaaaagttcaatgcatctagttgtttcaggtacaaaggaagcaataatgatggttgaagccggagctgatgaagttccagatgaggtaatgcttgatgctattttatttgctcaccaagaaataaaaaaaatagttgagtttatagaaggtatagttgcagaagttggaaaagaaaaaatgcctgttgaattataccatgcaggagaagaaataactcaattggttcgcgaatttgcaactgataagatgaaaaaagcagttcagacttttgaaaagttagagagaatggaaaatatggatagagttaaagaagaaactttagctcactttgaagaaactttagaagattttgaagattttgttggagatatagaagaagtattacaagatataataaaagaagaagtaagaaaacttatagtacatgaaaatgtaagaccagataatagaaaacttgaagaaataagacctatatggtgtgaaactggcatgatacctagagctcatggttcagccatatttactagaggacaaactcaagtacttaatgttgctactttaggtgctttaggagatgttcaaaaattagatgggttagatgaagaagaaaacaagagatatatgcatcattataatttccccgcatatagtgttggagaagctagaccatcaagaggaccaggaagaagagaaataggacatggtgctttagcagaaagagctttattaccagtaataccatctcaagaagaatttccttatgctattagattagtttctgaagtattaagttcaaatggttctacatctcaagcaagtgtatgtggctcaacattatctttacttgatgcaggtgtacctataaaagatatggttgcaggtatagcaatgggacttataaagcatgatggtaaggttgcagtgctttcagatatacaaggtatggaagaccatttaggcgatatggactttaaagtagctggaacagagtatggtataacagcaatacaaatggatataaaaattgatggtatagataaagaaattctacaacgtgctttaaaacaagctaaagagggtagaatccatatactaggagagatgagaaaaactatatctcagccaaaaccagaactttcaccatatgcacctaagattgttaaaatgcaaataaatcctgacaagataaaagatgtaatagggcctggtggaaagataataactaagataatagacgaaactggagttaagatagatattgaacaaactggggaagtatttatatcaggtattgagattgatatgattaagaaagctcaagaacttataaataatatagtagttgaaccagaagtaggaaaaacttataaaggtaaggtaagtagaataatgaactttggagcatttgttgaaatacttccaggaaaagaaggattacttcatatatctcatatagctcatgaaagagttgccaaagttgaagatgtattgaatataggggatgaagttgaagttaaagttacagagattgatgaaaaaggaagagttaatttatcaagaaaagttcttttaccaaaaccagaacataaaaataaataacttattatataattaaaagcaaagtcttaggattttgcttttttaaatacaaaaaagtagataattttaaaatgatagttatggatggcttatagttctttttctgtaaggctttactcttataaagaagctatttaaaagctgattaatagaaagctttattgatatatatagaatcacttaagttatatttagtgcataaacagagcttatttttaatagtattaaataagaaacaatttgtacataattagggggagttttaatgataatgatggtacttaataagagtaagctcaaaaaaatcataatactaattttagtagtgttattagtattatcaggaggggtaatggtattaaagttatttaacaacaagccagtatttaatttatttaatggtgtagatttaccatatgaaagaggtacaaaggataaaagtggatatgttgcattaacctgtaatatagaccttggatgggaaacagagtacgtagaatccattttagaaacacttaaaaaagaaaatgtaaagattacatttaatgtaactggaaaatgggcagaaaagaataaggatgaattattaaagataaaaaaacaaggacatgaaataggtaatcatggatataaacatttagattattctacattatcatatgaagacaattatgagcaaatagagacctctaaaaagataattgaagaaattataggtgaaaaaactaaattttttcaagcaccagcaggttcctttggtccagaaacagtaaaggctgctaaagcattagggtatacttctatcaaatgggatgccgatactatagattggaaatacaaagaccaaccagaggtaatcattgatagaatgaagaaaaaagacattaaagatagtagtataatcttaatgcatccaaccaacgcaacgacaaaatgtatagatgatattatagctattgtaagagaaaaaggactaaaaccagggaaacttagtgatgtatttaagtagacaaagtataaatatttggttaagattgtataagttgtagttgaattaattaaaagactgacttataatgtaatacatataaaaaataaatataattaaaacatagtgttttcaataatccaatatgaaacaaagaataaattgttaggagaatgtaatgtataagacaaaaatactggaaaatgggcttacaataattggtgaagaaataccatatctaaagtcaataacattaggtatttggataaatgcaggctctaggatagaagaagcacaggtgagtggaacttctcattttatagagcatatgatgtttaaaggaaccaaaaacagaacatcaaaagagattgctagttcaatagataatttgggtggtcaaataaatgcatttacaagtaaagaatgtacatgttattatgtaaaactaatagatgagcatatagatacgggaattgatgtattgagtgatatgatactaaattctaaatttgataaaaatgatatagataaggaaagacttataatattggaagaacttaagatgtatgaagactctccagatgacttatcttatgatttattagtggaaaatatatatgctaatgatggattaggaatgaatataattgggacaaaagaatctctatacaatataactagagaatccatgttagaatacttaaataagtattatattccaaataacgctgttatttctatagctggaaactttaactttgatgatatggtggagaaaatcaaatcaaaatttggacactgggaaaagaaaaatttgagtatagacataagtgaggctaagtttaatccttgctttatatcaaaaaataaagatactgaacaggtgaacttagctatctgcctaaaaggtattccttttgaaaatgatgaagaagtctactcaatggcagtggtaaataatattttcggtggaagtataagctcaaggctttttcagaaaataagggaagaaaaaggtttagtatattcaatatactcatcacagacattatataggaaatgtggtgaattaggcatatttgcaagtatgagtacagaaaatttacaagatgtatataatttaataaagaaagaaattgaaaatataagagaaaactatcttacagaaaaagaaatatctgaaagcaaggaacagttaaaaggaaattatatattggatttagaaagtactagcagtagaatgatgtctactggtaaatctatgttacttagcaaaaaagtaaaaactacagatgaaatacttgaatgtataaataatgttaatattaattcaataaagaaggttgttgataaggtattcaatatcgaaaatattggtacatgtatagttggaagagatgtagaaaagattctacacttggattaatattgaaaaaagtaaatctctggaggtataaaatatgaatttatctgaaatagcaggtaaggaaatagttaacttggtcacaggagaaagattgggggtcattggagaatgtgaccttatactagatgaaactacaggcggtatattagcgcttctaattccaaaggaaaaaggattttttgccagaagaaaagataagtcatttttagaagtaccatggagaaatgtaaaaaaaataggtaatgacatgataattatagaatatgagggatatatttaggaggaaaaaatgagtattttagtgcaaaagtttggtgggacatcagtagaatcatatgaaaaaatgaatgaagtatgtaagatagtaaaagcatacaaaaaaaatgatgaagaattacaattagtattagtagtttcagcaatgggaagaaaaggagctccatatgctacagatacacttataaatttgtgtagtgcagtaaatgatgagccaagtaaaagagaacttgatttaataatgtcttgtggagaaataatatcaggaacaattcttgctaatttattgaatgcacaggggatagattctgttttctttactggtcagcaagcaggtataattacaagtgatgaatattctaatgcaaagataaagtatataaatcctaaaaaggtaaaaagagctttagatgatggtaaggttgtagttatagctggattccagggtgtaacagatgatggagaaataactactcttggaagaggaggaagcgatacatcagcagttgctattggtaaagctttagaatgtgaaacagttgaaatttacactgatgtggatggtataatgactgcagaccctagagtagaaccaaacgctaaagtattgagttttatagattatgaggaagtattccaaatggctgacaaaggtgcaaaagtaatacatccaagagcagtacagttggctaaaagtggaaatataactttagccataaagaatacaatgaatccaacttttgaaggtacaaaaataggttctttatgtagacacttagaagagaatatagaatatgaacaagaaagagattttaaggttgctgttgcaaataaagatagtgtagcacaagttaagattaaatcagcagaagaagtgtttacagaagtattaaatgagatagaaaagaaacttataactatagatatgataaatttctttatatcagaaaaagcatttgttgtagaagatgctgatataaaatcattaaaggaaatactagataaatttgaattagattatgaagtaaatagagactgtgctaaggtaacattgatatgttcaagaattgctgatgaaatgtctggtatcatgtcaaaggtagttagaggattatcaaaagcaggggtatctcttttacaaacatcagactcaaatatgactatatcttgtttagttagtgaagaagatatgcatacagcagtacatgctatacaccaacaattttatttaaaataaactgtataatacaattattttttaatcaaatttaagaatttcatatatatcttaatatatttgatttatttggtaaaactaaattaaatataattttgataggagtttttttatgaaagattatagagaagataatgaaagatttgataaagataattgtagtgaagaatctagttgcgaagagagagaatgtataaagcaatttggtaccaatgaaatgccacctcaacctcctaaagatattcaatgtataactataattggagaaattgagggacattttataggaaatcctcaaaaaaaagctacaaagtacgagcatataattccaatgctatactcaattgaggaaagcaatgatgttaaaggagtgttagttgttttaaacactgttggaggagatattgaagcaggtttagctattgcagaacttttaaacagtacatctaaaaaagtagttactcttgttctaggaggaagtcatagtataggtgttcctcttgctacagcaggagattactcatttatagcaccaacagcaaccatgattatacatccagtgcgaactactggtcttgtgattggtataaatgagacttttgaatattttaaaaagatgcaagatagaataattcaatttataataagaacatcaaatatcaaaaaagatgtacttgaaaaacttatgcatgaaaaagatgaacttgtaagtgatgttggtagtgtattaataggaaaagaagctgtggattatggtcttatagatgaagttggaggactaaaagaagcacttaaaaaattaagagagcttataaaagaatctgaggaagaaaaaaataatgattaaaatttgtttaaataataaaatttatgatataatgatgtaataaagtaggagtgttagtgttaaggcattagcactttttgctgtgaaggggtaaaacttgctaaaaataaggagtgatattaatggccacgaaaaagaagaaaaaaaagaaggtaaataccttaagttttaatgcagaatatcataatttaataacaatatttataggtgtatttttattatatagtttaaattctaattctatgggatggatacctgtgttaatgcaaaatctttttaagggactatttggagggctttcaatagcaataccatttatagtaattataacaggacttttaggattttttgatggaaatgaatatatatataggctaagaaagactaaactatactacataattattttatttatatttgtattttatggattattaaatgcaggaactcttcctgtagatagcccactaaaaggtaacatgtttgatgatgttatgaaattgggtgtaagtggacaaggtagtggtttgatagcaacaactattgcgtattatatgagtaaaatatttggtatagcaggtggatggttaataagtatcttcgcacttatactttctgtaatgtttatatttaatatttctataaaagatttggtgtcaaatgcaaaatcaaaatctaaagcatctaaagacagcaatttaacgtttaaagataaaattgcaaatatgaaaaaatctgcaatagatatgatgactgatgaagtagatgatactactataaataaaaaaccaggtttctttaaagggttaatgtcaaaaggtcttaataatgatgatgaagaagatgaatattttgaagaagaaaatagtgatggtgtagatgataaaactataaaaatagttggatttaataaggcagaagatgagtatttagaaatattagaaggaactcaaagtatgccagagttagatgttttaaaagaattacaaaaagctaccaatgaaaatccagttgtagatactaaaccagaaaaaaaagttgatatagctaaatctaatttaaatatagaaaaaactcaacctatgagtattgtagcagagccagttaatgaggattattcaaactataaaaagcctagcattgagcttttaaataaagtaaataagaagtctgatgaaaatggtaaaaagaaagtgttgaaaaatgcttctcttttagaaaagacactatcagattttggagtggaagcaaaaattaatcaagttacagttggacctactataacaagatatgaaatacaaccaagtccaggagtcaaggtaagtaaaattgtaaatttaactgatgatatagctttaagtttagcagctaaaagtataagaattgaagccccaattcctggtaaaagtgcaattggaatagaagttccaaatgaagaagctcaaatggttggtgtgagagaagttctagaaagtgaagaatttaataattttaactctcctcttgcaatgggacttggaaaagacgtagcaggaaaaattataattggagatataggtaagatgccacacttactaatagctggttctacaggttcaggaaagagtgtgtgtgtaaatacattaataagtagtattttatataaggcaaatcctgatgaagtaaaattactattaatagacccaaaagtagttgaacttgcaaattataatggaataccacatctattgataccagtagttactgaccctaaaaaagctgcaaatgctttaaattgggcagttacagagatgaatagaaggtataaattatttgcagatgctcaagtaaaagatgtaacaagttataatgagaaagcggaagaaaaacttcctaaaatagtaataataatagatgagttagcagatttaatgatggcaagtgcaaatgatgtagaagattatatttgtagattagctcaaatggcaagagctgctggaatgcacttgattgtagcaactcaaagaccatctgttgacgttataacaggggtaataaaggctaatataccatctagaatagcatttgcagtatcatctcaaactgattcaagaacaatccttgatatgggtggtgcagagaagcttctaggtaaaggtgatatgttattctatccacttggtgcagcaaaaccagttagacttcaaggggcattcatatcagagagtgagtcggaaaaagtaattgattttgtaaaaagtcaggttaaagatggaataaaatatgaagaagatataattgaaactatatctaaggttaatacttcaaagagtagtgatgaggatgagtttttgagtgaagcgatagaatttgtcgtggaaagtggtcaagcatctgcctctatgctacagagaagatttaaaataggattcaatagagcagctagacttatagattctatggaagaaagaggcataattggagcaagtgagggaagtaaacctagaaaggtattaataagcaaacaggatttgcagaatttagaaggtgaatagaattgtcagttataaaaatagaaaaagcacttaagctagataaagtaatatttgtagatgtgagaactgaaggagaatatgaagaagaccatatattgaatgcaatcaatatgcctctttttaaaaataatgaacataatgaagttggaacaatttataagatgcagggaaaacatgaagcaatacaaaaagggtttgactatgtatcgtataaattaaaggatatatatttacaagcagcagaacttgcattaaattatgataatattgtcatatattgtgcaagaggcggaatgagaagtggaagtatagtaaatttattatcatcattaggtgtaaatgtatatcaacttgaaggtggatataaggcttatagaaattttgtattagagtatctaaggcatgtaatggatacaaaaaactttgtatctgttcatggattgactggtacaggaaagactgatttgttacatttattagatgaaaaaggaatagatgtactggatttagaaggcatagctaaaaacagtggttctacctttggttttataacttttgataaaaagccaccatctcaaaagaactttgaaacaaaactatttgaaagtgtatttttttcgaaagagaattatatatttgtcgagagtgaaagcaaacgagttggaagtgttacagttccaaatgaaattttcgaggcaatgacacgagaaggacatcatatattattagaatgtgatattgaaaatagagttgatagactttgtagagattatatttatgataaagatgaaggtaatatattgattttaaaagaatgtataaacaagtttagaaaaagattgggtaataaagtagtagatgattatattgatttattagaatcaggtgaatataaagaacttgtaaaaagatatcttttagaatactacgacccactttatatgcattcagtagagaaatataagtatagtaagattataaattttaatgatacacaaaaagctttagaagatgttatagacttatatgagagtatattggaaggagaaagtgaatgttaaaaatagcattggaatcattaggatgctcaaaaaatttagtagatgcagaaataatgatgggaattttaaataacaaaggctataaattaattggagattttgaagaagctgatgtaattatagtaaatacatgtgggtttatagagtcagctaaacaagaatctatagatacgataataaacttttcagagttaaaaaaaactggcaatttaaagttgttgatagtaacagggtgtctagcccaaagatattctgaagaattaaaaactgaaattcctgaaatagatgctatagtaggaacaggaagctatcaaaatatagataaaatacttaaagaattaagtgaaatgcatcaaattgtaagccttaatgatatagagtttgtatttaatgaagatttaccaagatatatatctacacctagctatatggcctatttaaaaattggagaaggatgctccaataattgtacttattgtataataccaaaactaagaggtaaatatagaagtagaaaatttgaagatataattaaagaagctaagaaattagctgaatctggagtaaaagaacttgtggttatagcacaagatacgacaaagtatggttttgatttatatggaaaagaaagattatcagaacttttagaagaacttgcaaaaatagatggatttaagtggataagggttatgtattcatatccagaatctataacagaggaattgatacaagttataaagaaatatgataatatatgtagttactttgatatgccaatacagcatgcaagtaacaatattttaaaattaatgaatagaaaaactactaaagaagatatattaaataaaatcaatctgataagaagtaatataccagatgctatacttagaactacgataatagtagggtttcctggtgaaacagaagatgacttcaaacaacttgtggactttgttgaagaggttaaatttgatagacttggtgcatttgcatattcaagagaagaagatacaccagcagatagattgccaaaccatatagatgaagaagtaaaaatacaaagaagagatactttaatgatgattcaacaaaaaatatctgaagaacttaatgacaaaaagataggaaaaacttatgaggtgttaatagaagaacagatagaagataatgtatatacaggaagaacacaaggtgatgcggaagaaattgacagtatagtgtatgtaaaaagtgtagacaatcttgaagtaggagaatttgtaagtgttcaaataaatgatgcaatggaatacgatttaatgggagatgttttatatgaacttgcctaacaagttaactttgtttagaatatttttaataccagtatttgttttaattatgttgctcaatgtaccaaataaatttttaatagcttgtattatttttataatagcttcaattactgatgctttagatggaaaaatagctagaaaatacaatctagtcactgactttggaaaatttatggacccattagcagataagttattggttatttcagcacttacatgtatgatagaagaccatcttgtaagtagttggatggtaattataatagtggctagagagcttacagttagcatattaagagctatagctgctgctgatggaaaagtaattgctgctggaaacagtggaaaacttaaaacgataactcaaatggtatctatagtgtttttattgttaggcgctcagtttgaaaatgtattgatattaaatattggtgaaattctcattcttatagctacactacttacattatattctggatgggaatatctatataaaaataaagagctttttatgtcttctaagtaaaaaattatgctttaataaataaaaactaatgattaataaataaaaaataacaacttaaaattttaaaaatgtaaaaaagggtatactattatagtatacctcttttcattttaagaatattttcttttgtgtatataattattaataatggtttataaataaaatgtaatgaataaaaatataatcattagtagcgtttttaaattgactaggtttgatttatgttatataattaatatataacaagagaacaaatgtttgtagataaatgaagggatggtatagagatgagtgtagatcaagaaaaattaaaagcgttgaatgaagctttaggtaaaattgaaaaagattttggtaaaggttcagtaatgaaattgggagaagcaacatctatgtctatagatgttatatcaacaggagcgattggtttagacatagctattggtataggaggtctacctagagggagaatagttgaagtatatggtccagaatcttctggtaagactactgttgcgcttagttgtgtagcatcagctcaaaaagatggaggaatagctgcatttatagatgcagaacatgcacttgacccagtatatgcaaaagctttgggtgtggatgttgataacctaataatatctcaaccagatacaggtgaacaggctttagagatagcagaggcattgataagaagtggagcgatagatataatagtaatagactcagtagcagcattagttccaaaggctgaaatagatggagatatgggtgattctcatgtaggtttacaagctagacttatgtcacaagcacttagaaagttaactggttcaattaaaaaatcaaattgtgttgctatatttataaaccagttaagagagaaagtaggaataatgtttggaaacccagaaactactactggaggacgtgcactaaaattctattcatcagttagattggatgttagaaaaatagatacaataaaacaaggtgataaagttataggtagtagaactagagttaaagttgttaaaaacaaagtagcaccaccatttaagcaagctgaatttgatataatgtatggagaagggatttcaaaaattggagaccttttagatatagctgctgatgtagatatagttaaaaaatcaggttcatggtatagttacaatgatactaaacttggacaaggaagagaaaatgttaaaaaattcttggaagataatttagatttaactactgaaatagatgagaaagttagagcattttacaatttaaatgaagaacatgaagaatcaggtacttcagtatcaaaagaaattgtagaagaataagtaaaaatacaaaaaaataactagtaattaaagacatgccacgctccctattagcttgacacaatgttgaaaaaattataaaattaagtgaggataaaatatctaaatttaattttaattattaggaatattttttaatcatagtgatgacattttgggattattaacgaaggaggtggatgtcatagatagtgtagtaatgattgtaataggtgcagctgttggtattatagctggatattttgttagaaaaaatatatctgaagcaaaaattggacaagctgaaaacttggccaaagaaataatagataaagcacaccacgactcagaaacagtacaaaaagaaaaattactagaagctaaagaagagatccataagtggagaacagaagctgaaagagaaaacagagaaagaagaacagaagtacaaaagtatgaaaaaagagtagtacaaaaagaagaagtcttagatagaaaattacaaaatttagaatctaaagaagtaaacctaagtgaaaaattaaaggtagtggaaaagaaagaagaagaagtcgaagtaataaaaactcaacagttagaaaaattagaaagtatatcaggaattacttctgataaggccaaagaaatcatcttaaccaatgcggagagagatgtaagacgtgaaatgtctataatgataaaagagatagaaagtcaagctaaagaagaagctgataagaaatcaagagaaattataggatatgcaattcaaaaatgtgcagcagatcacgtagccgaaactactgtaacagtagtaagcttgcctaatgatgaaatgaaaggtagaataataggtagggaaggtagaaatataaggactttagaaaccttaacaggtatagaccttataatagatgacactccagaagccgtaattttatcaggatttgatccaataagaagagaaattgcaagaattgctctagaaaaattaatagcagatggaagaatacatccagctagaattgaagaaatggttgaaaaggcgagaaaagaagttgacaatattataaaagaatatggtgaacaagctgcatttgaaactagtgtacatgggattcatccggaattaataagattattaggtagacttaactatagaactagttatggacaaaatgtacttaaacattctatagaagttgctcatatagctggtataatggctgctgaaataggagcagatattagattggctaagagggcaggtttattacatgatataggtaaggctgtagaccatgaaatggaaggtacacatgttgaaataggtatggatttacttagacgttataaagagtctaaagaagttatacatgccatgagtactcatcatggagattacgaacctcaaacagtagaggctgtattagttacagcagcagatgcaatatcagctgctagacctggtgcgagaagagaaactttagaagcatatataaagagacttgaaaaattagaagaaatagctaattcatatgaaggtgtagaaaaatcatttgctatacaagctggtagagaaataagaataatggtaaaaccagaagctataaatgatgaagaaatacatctattggctagagatatgactaagaaaatagaggatgaacttgaatatcctggacaaataaaagtaagcataataagagaaacaagagctatagagtatgcgaagtaaaagaaataatatctaaataataagaaaatatttttagaaatttaaatttgccacaagatatgataatatatcttgtggcttttaaattgtttaagtttaattttatataatgcaaaaataatctaagtgctaaaagtgctacttacaaaagattaataaaataaagctttatatatgtattatttatataattatccaagtttgtttgatataatgaagttgtaaaatcaatactttactacaaaataaatagtaaatactacagtaaaatctaaaaataggatataatagtattaatataagaagattataaataaaacctgctaatgaaaatagattatttttagcaggtttttaaattttttataataaatcttatttttagtcaacaagatttattttttttaaaactttacttactattttaaacattaattatgaaatttatcattttattatttacagaaagtattctataacaataaatatctatatttattgcaaaattattttagcagttttgtatttatttgtatttattttgaatttatttactaaatttgcctataaaaagtatatataaaaatatagttcaaaatggtataattaagtataacagaaggaggtaatgtaagtgagccaatacataaatataaattctcagttagacgccctaaaattgaaggagttcgagaaaatattttacgaaaatatcaatgaggacgttaaagtagtgccaaaagttactccttttaaaggaataaataccgatttgttgtatgttaaagatggaagaattttatttataaaatttatggatacaacagaagatatattttttattttagaagaagagttacttgaagttatgaatgaggaatatgaacttttgaaactaaaaatgggacaaaagaatagaaatataagttataactacgtttacattatgccatacgttgaagttgaggaaacatatgaatttgaagaatttgttaataataatataatagataaaaataagcttcaagatataatgaataagggttcgctggaggagtatcttaatgatgagaatgatgaaataaacttaaatttatttttactagacatatgttcagaatactatataataaatgataaacttcatctaaatgaaaaatttaaaaaaatttcattctacaatgatgactataagtatacagcaactatgatggaagacgttcaaattaaagatgttgtttctattaaatatgggaatacacttattgaaggtggttctggtataggcaaaacagcaattatgctttctagggctataaaattagcaaaagtatatccacatcataaattagtcatatttacacatacaaaacaattgtgcaatgagcttcgagagaggatagagttattatacaaagataataacaatttagaagttcacacatttagttcttttatatttaaactagctaaaaaattcaatttaattgtagattataacatgttaaaaaatgattacgaaaagacctttaataatcttgtaaaacaagcacagaacattataaaaaataaaaatatgttcaaggctatttttattgatgaagcagaaagctttttagagtatgaaatagattttataagggagtttttatataaaacaaaattcatatttaatgtgtgttcttgtaactccttgaatatctctaatagattgaatatatttaaaaaattatataatggtatagaatttgatgataagattatcttaagtaaaaattatagacaagctaaagagattgtagattttacaaataaattttcaaataattctaactcatatatcaacgaattaagaccaaatacagaatttagtactttcttttatactaaagcacttagaggtggaaataagtctgttgatataataaaagtaagtgaccttgatgaccaaataagttctgtaatctgggaaattgagtatttaataagtaaaaaaggtcttgattattctgaagttgctatcgtttatccttataataagaagaaattaaaaagtggaaaaaccatttactttcaatatatgttaaaaaaagcattggaagaggcaaaaattccttatatatgtgcagaagataatttgacaaatataagtaagaaggtaggaactacaatagcaaatatatatgcaataaagaatttagagtataaagcggtaatagtatgtgaattagagatgttatacaatcaaactataaatgatattgaacaagattatcaagtaaatgactttgtaggagatttaaataaggtttatttagctatgagtagagcaacagactacctaagtatagtaacaacttttaatgaagaagcaagtgatataataagacttattacagaatcaaaagatatttagtaaaaaaatatttgtaatttaagaaaataaaaagagactgagatttgtaaaataaactttaccaattcagtctcttattttttagtccactttcccaatattatcaagaggtaatagtctcaccataaccttaccaagaatttcatcttcatcaaccatacctacatcagggaatctactatcattactattttctctattatctcccattgcaaatagtttaccttttggaacaacagtatctatatctccagaagtatagttattgtgtatatatggttcatttaataattttccatttacatacactttagaatttgatatttttattctgtcaccttcagtagctataactctttttattaagtcttttttctttcctgtttctccatcaactaaattggttttaaaaactacaatatcgcctttttcaggtttaccaaccttgtatgatatcctatttaaaatcagataatctttatcatctaaagtaggatacattgattctccacttacaacagaaggtcttataaattgtagaattacaaatgcaagtacaatagccatagctattgacttaatccaatcaaatatttcttttttaacactcataacttttctccttatcatttgttattaaattagaatacattataatagaaagaaataagcaagaaccactatacccaagactattctataataaccaaatactttgaagtcatgttttttgatatagtccataaaaaatttaataactacaattgaaacaacaaatgctactacagaaccaacacctaaaataagccattcaaatccagtaaatccaaatccagcttttagaagttttaatgcactagctccaagcattgtaggaatggctaagaagaatgaaaactctgctgctacatatctagaagtaccaagtaatactgcacctattatagtagaaccagacctagatgtacctggtatgagagctagacactggaataatcctatacaaagagctaatttatatgtaacttgagaaaaatctttatacttaggtcttttatttctcttttcaagccctatcattattataccatagacaataagagcaatagcaactactgttgaattaaagaatactctgtctatgtcatcttcaaacagtattccaataactccagatggtataactgcaattataaccttaagccataaacgaactgtttcttttttctgtttaatattctttgcactatcaaaaggatttaactttctaaaaaatataacaagtacagctagtattgaaccaaattgaattacaactaaaaatgtatttataaatgtatttgaaaaattcaattttataaactcattaattaatatcatatgccctgtactacttactggtagccattctgttattccctgaactatgcccaaaatgactgccttaaaaatttcaagcaaactaaatgtttccaaatcaaaatacctccaatacaaatttatagtagcatattttattcatagattaataaaaaaatgccaccttttactaacttataataccatagtactgtgtagtgcacaatggaagattgatattttcataaaaccttcataatataacaaaataaacttaaaagttatctattgaataaggggtatatttgagggggaaatatatggtatagtaaaagtatagctattttattttatgaaaaggaaaggagttattatgtatagtacaaaaatactagatgattatgagtatgaaacttttaatgttttttctacaaaattaaatccaaacacgaaacacgattatttatcaaaggttatactgtttaaagaatttttaaaagggaaagaattgatttatgctacaaaagaagattgtaaaaattttgtagactatatacagactaaatatgcgaaatcaacttgtgaaaagatatatagttatttacatagtttttataacttcttaaaaaaagaaggatacatagatataaatccatttagatatgtagaaaaacccacagtaacaagaataaaaacaaaagatgatgttctaagtatacaagaaataaataaacttataggtatcctaccaaaattaaatataagagatagagtaataatagtctgtctagttactactgggtgtttattaaatgaattagttagcttaaagtggaaagaccttatggtagatgaaaacgataactcatatgtaaggttaggtaagggaagaaaagaaagagtagttaaattacatccatacttttttaaacttttagaagattacaggaattattctgggcttccagaggtaataatacctagtgatgattttatttttacaactcaaaagagtaattctataacagatagaaatgtcagacttatagtcaaaaaagcattagatttagctggactttctcaatattcagcaagagattttagacattcatttgcagcaataagtttaaggcttggggcagatgaaagtgatgtaaaaaatcagcttggatggagtgataaatactatgcaattagatataagtatgtattaaattttgttgatagtgaaatagtggattacttaattgaaaaagataatttggatataaataaaaaatagtaataaataaaaaatactatatatagatgtgaacaaaaaataaaaaagtcttgttatagttcgtaaaattatatataattatttatgtactaatgtgtacacagtaatcacacgacaaaagatttaaggaaggtgctaatataatgatagataataaatatactacttactcaaacccacttacagacagatattgtagcaaggacatgagttatatattttctccacaatttaaattctctacatggagaaggttatgggttgcacttgcagaaggtgaacatgagttaggaatcaatataactgaagaacaattagatgagctaagagctaatatagataatataaattttgatgaagctagaaaaatagaaaaagaagtaagacatgatgtaatgtctcacgtaaaagcttatggtttacaatgtgaaaaagccaaaggaataatacatttaggagcaacatctgcatatgttggagataatacagatgttatacaaatgaatgaagctttaaaacttctaagagtaaagcttgtaaatttaataaacaatttaaaagaatttgcacttaagtacaaagatatgccagctcttggatttacacacttccaagctgctcaacttacaacagtaggaaaaagagcttgtttatgggctcaagatttaattcttgatttggaagatttaaactatagaatagataacatgaagttaagaggagttaaaggtactactggtactcaagcaagttttttaagcttatttgaaggagaccacgaaaaagtaaaagagttagataagaaaatttgtaaaaagatgggataccattcttcctatgcagtaagtggacagacatatactagaaagttagattatcaagtaataagcatactatcagggatagctcaaagtatgcataagatgactaacgatataagacttttacaaagtttaaaagaattagaagagccatttgaaaaaaatcaaataggttcatcagcaatggcttataagagaaacccaatgagaagtgagagaatagcatctttatctaagtatataatctctgaatctataagccctgcaatggtacaagccactcaatggttagagagaacattagatgactcagccaataagagattggcaatacctcaagcatttatggcagcagatgctatacttgaaatagggataaatgtaactgatggtttagtagtatatgaaaatatgataaataaacgtgtaaatgaagaacttccttttatggctacagaaacaatacttatggaagctgtaaaaagaggtggagatagacaggaattacatgaaataataagagaatattctatgaaagctgcctatagagtaaagcacgaaggtaaggataataacttaattgaacttataatgaatgatgattcatttaaaatgagcaaggaagaaatactatctataatggacccaaaaaactttataggtagagctccagaacaagttgtagaatttgtaaatgaagttgtagaacctgctataaaagattataaggaagacttaggaaaagtagatgtggacctaagagtatagaattgtacagataaaatataattaaaaacggctatcttatttataaataagatagccattttaatgggctagcgtcttctcttcagcgctgtgaagagttcttctttacttactataccatgaatttaataaaatagctatataaataatatttaatagaaataatataaataaaaataaaaaaatgataagattactaattaaatttaaacattcagcaaaaactattgtacttgcaatatttttaatgtaaactgaaataaagttatttagataatttaataaattttaaaacaaccgaggtgattatatgaactatatagtaaaagataccataagttttttagtaaaaacatttcctaagatttattctagtctgtacttagaagacctaaaaaaatttgcaccagattataatgtaaataaaacacaattaagagcattagttttcataaaaaattatggagtaataagtatgactgatttatgctctaagttaaatatagaaaaaggcagtttaactagtatggttgatgatttaactgataagaagtatgtaacaaggaaaagagatttagttgatagaagaaaatatctaattgacattactgaagagggagataagatagcaactgattttatggataaattaagtgatggtttaggagaaaaactttctaaattaactgaagaagacagaaaaaaatatttagaagcaataaatactcttcaatatatattaaacaaagaagaatttagatagaaaaaatataaaaaatttttatatttaatagtactaagattaattctttgttattcatttaactatataattataagtctaaatacaatctaaaaagtacatcttaaattttcttgatgtacttttttataatttcttatacattttcttatttgttagtacctactcatacctctttgtgtaatttatatttttccattttatattcaataattttattttctaatctctttttaaatttctatatatcacaatgttactatgtctttgtttgaaaaaatttacagttttgaaaaaattactatttatgtaaaaatattttaaaacaaattataaagtttcaaaaacaaaataaaaatatataattatgacatagaaaacgttttaaaaatttaaaaatggagggatagaaatgaaacaaaaaatgaaagagttttttttacagttaggaaaatcatttttattgccaatagcattaatatctgctgcaggtatatttttaggaataagttcagcattttcaaatcctaatatagttagtgatataccttttttagaaaataattttattcaaggaatattgggttttacaaaagctataacaggagtactttttggaaacttagcaatattctttgctatatcaatatctgttggtcttgctaaagaagaaaaagcagtttctgcattttctggttttgttggttatttagtattacacactagtgtaaattatatgttagggtgtagaggtattcttgctgaacctgacatgatgagagaaatgggtcaagctgtaactttaggcatacaaacattagagttaggagtatttggtggaattgtagttggtataataacagcatcattacataataaatactataatataaaactgccagattatttagggttctttggtggaactaggtttgttccaataataacaacagtagtattctctattttggggataataataccatatatatggccatatgtaaatacaattattcagagtgtaggtattggtatagctagtttaggatatttaggaacctttgtatttggatttcttgaaaggcttttaataccatttggattacatcatatattaaatgctatgtttagatttactgaagtaggaggttctttagttgtaggaggacaagaagtatttggagcattgaacatatttttagctcaactaagtgaccctgaaacaatcagtttttcaacagaagcaactagatttttagctcaagggaaaatacctataatggtatttggtcttcctgctgcagcatatgccatgtataaaactgcaaagcctgaaaataggtcgaaggttaaaggtatattactagctggtgctttagcaacatttgtaacaggaattacggaaccattggaattttcattcttatttgtatcaccaatattatttgttatacatgcatttttatcaggtatatcatttatgatgatgcatatatttggagtagcaataggaaatactcaaggtggcataatagatttagtagtatttggagttatgcaaccaaatacaaagtggatttattctataatacttggtttagtgtatgcactggtttattataatgtatttaaggttttgatacttagatttaacttacaaactccaggacgagaagaaataacagatataaattttgatttagaacctttatcaaataaagtagaaatagctcaaagtggagaaactactaagagagcattatccataattaaatatttaggtggtaaggagaatatagaagatataacaaactgtataactcgcttaagagtagtagttaaagatatgagtaaagtagatgaaaatgcttttaaaaaatatacaggtgcaatgggcgttataaaagtatctgataaagatatccaaataatttatgggccatctgtatctcaagtaagagacgaagtttcttttgcaatgtctatttaatgtctatctaatgtaaatattaaaaggcaatactaatttataatttgtattgtcttttttgtagtataataaacataagataaatgttgtatagtgtatatttatataataaatatgagaaagttgtttaactacaaatcattattatggaggtataaatgaacctaatagacaaattagatataaatcaaaaaaaattatctacaaatgaaatatctcttttaaactattttctaaaaaattctgaaaaaataaatcaaaaaaagattaaagatatagcaaatgaaacttttaattcgactgcatacatagtaaggttttgtcagaagctcggcttttctggatatagtgaatttaaaaactttttagttttttcatattcaaatagaaatgaaagaaataaggagtttactaaaagtcaaagtgatatttttactgatgttatggatacacaaaatttaataaatgtagagaatatagatatgtgtttaaatgaaatacataattctaagcatatatatttttttggtgttgggtcttctagattagtatgtactgaaatgtctcaacgtttttcagctataggtgtaaatgtaaaatactatgatgattcaactctcatgtatttggctgcatcaaatattactaaagatgaccttgtaattgctgtatctatgtctggagagactgctcaagttattaaggcatgtaatatagcaaaaacaaatcaagttaaagtaatttctctgacaaatataagtgtcaattcattatcaaatatagctgatataaaattatttgtatcttctccacaatataattttaatagtgttaactatacgtctagagtgccagcactttctcttatggaatatatgtttcataaatacattgaaaaatacaatagatgaaaaaaattacaattttgaaaaaaatactaaaattgaactatttttaatgattacctaaaagtattcatgtagaaaactttatatattataatcatcttacaagttagttaataaaaaacaggggtgattaatatgacaatgaaaaaaagatacaatatagctatagttggaggaggcagtacttggactccaggacttttaaagtctttatgtaaaatgagtgatagatttcctctaaataaagtaactatgttagatgtagtagaagaacgtcaaagattaataggggaatttggaaaaatattatttaaagaagaatatcctaaagcaacacttgaatatactacaaacccagatgaagcatttatagatgtagattttgtatttgttcaaatgagaactggtggtcttaagatgcgagaattagatgaaaagattcctctacaatttggactggttggtcaagaaacttgtggagctggtggatttgcttatgggttaaggtctataggtgatatgatagaaatggttaagactgtaagaaaatactctcctaaagcatggatattaaattatacaaatcctgctgctattgttgcagaagcattaaaaagagtatttccagatgataaaagattacttaatatgtgtgaccaaccagttaacttgttaaggtcttatggaagattgttagacatggattcaagaacatttgagcctgtatactttggattaaatcactttggatggtttacacatttgtatgataaaaatggtgaagatttggtacctaagataaaagatttagtagcaaactctggattccaacctgttgatgcagaacaaagagataaatcttggttagacacttatggaatggttaaagatatgttggaagatgtaccagattacttacctaatacatatgtacagtattatctatatcctgataaaaaagtagctaaatcaaatataaattgtactagagcaagagaagttatgaatggaagagaaaagcgtgtatttgaagaatgtaaatctgttatagaaaaaggaacatctataggttctaatttagtgcataatgatgctcatggggaatttatagttgaagttgcagaagcaatagctcataacaaacaccaaatagccatagttataacagaaaataatggggctattaacaacttacctgatgatgcaatggtagaagtagctgcgattcttacaaagaatggaccgagacctttacatgtaggtaatataccaacattttataagggactgttagaaggtcaactagcttatgaaaagttagcagttgatgcatactttgaacaatcttatgaaaaagctattttatctttaacattaaatagaactataatctctccaactaaggcaagacaagttttagatgctttaattaaagtgaataaagattactggccaacactatataaagaaaatgaaaaatagtcaggtctaagtcttaattaatatattaattaagaaatgtccccttttcaaataatatctgaaaaggggacattttatatcattaaatttatataaattaagtttaaaaaattatttttgtaaagctacatattgctctaaaccttcttttaataatgtagcagctctatgaaggtctttttcatttaagatgtaagctaatcttatttcatcacgtcctaaacctggagtagcatagaatccttcagcagggcaaaccataactgtttcattatctttgttaaattcttttaacatccaaattgtgaaatcttctgcattttcaactggtaatttagcaactatatagaaagcaccagttggttttttacatataacaccttcaaccttcattaattcattgtataatacatctcttctttttttgtactcttcattaacttctttgaagtaagaaacaggagttttgtataactcaacagctcctatttgctctaatgtaggaacacaaagtcttccttgacataatttaagtatttgagcgataagacctttatttttgcaagcgatagaaccaattctagcaccacaagcactgtatctcttagaaacactgtctattattataactctatcctgtacaccctctaagttaccacagcttgtatactcaagcccatcataaacaaattctctataaacttcgtctgctattatccataaatctttttctttagctatttcagctaggatattaagttcttcttttgtataaattgcaccagttggatttcctgggttagaaagaattatagccttagttttatcatctactttagacaatatttcttctttagatggaaggtggaaaccgttttctgcctttgttgtaacagcattaacttctacatttacagattgaccaaatccattgtagtttgtatagaatggttctggaactaatagattatctcctgggtcacaaactgccatcatagtgaaaagtaaagcttcactaccaccattagttactaataattcatctttttcaaaattcatatcgtaagttttatagtaattttgaagtgcttctaataattctggaataccttctgatgtagcatattctaagacttcgctatcaaagtttttaacagcatcaaaaaatcctttaggagtttttatgtctggttgtcctatgtttaagtgatatactttgattcctttatcttttgctgcttgtgcaaatggaacaagttttctgattggagaggcttgcattgcactaactctgtttgaataattcattttaataccccctatttaatttaaatacgtatattgtattatgtaaattgtatgtttgaatacaagacatctttacaagataataataacatacttatgggtaaaaatcatcaaaaaaaattaatatagctttaaaataaacttttaacaaattatagtaaaatacccatgtttatgccactaaattatgtattcataaattaatttatagtaagataatattctgatacactgatagtgattttttagttataatctttcagctatagacaaaatatataataataaatatgcaaaattataaaaaatattataaatttatttaacagatacgataaatatcatataattatattaaaggctattaactaagaggtgttaattatgaaagaattaagaatagatccaattactaatgatgttgttatatttgctacagataggttaaaaagacctttagatacagcagatatcccaaatgaagatgaagaaactaatgaatatgatgaagaatgcccattttgcaaaggaaatgaagctcatgcaactgatgcattatttgaaatagaaagtgaagaaggatggcttgtaaaatctgtctacaataaatttcctataattgatgatatggcaagagatgtatatggtgttcatgaagtaatgatagagagcgataaacataatcgtagtttttataacatgagtcaaaaagaatttgaagatgttttttttatgtatagaaatagatttagagatttgtcgaaagatgataaagtagagtatgttagtatcttcaaaaacttcttgagaaaggcaggagcatctttgatgcatccacatgctcaaatattgtctatgtcttttattccacctgaaattacgaatgaactgttagtttcaaaggagtattatgacagcaataaaagctctttgtatgatgatttaatagaaaatgaaataagtttagatagaagagttgtttataatggagaagcttttttggtacttataccatatgcaaccaagtatagtggagaagtaagaataatatttaaagataaaatagagtttggtgagttaaatgataataatatacaggagctttctacaatatttgaaaagttgtttaagaagttatacaatatcaatggatatatgccatttaacttatgtattcacactcatccaacaaagattgaaacaaaatcgtattttaatgttcatatgcacataatcccaagaaaatataattttggaggatttgaacttggaacaaatatgtatgtttcttcaatgagccctgaagatttaacaaaaaagttaaaaattgattaaaacatatatttttaggtattaagtaaatagtaattatagatgaaattatagtatagtattgttaaaataaaagtaaattaagaatttacaataaaattgttgaaaagcccccatctttagctatggggagtgtgtcaatgtttagatgaggagtataagtatgaaatttatatcatggaatgttaatggaataagagcttgtgttgggaaaggatttttagactttttcaaagaagtagatgcagatatattttgtttacaagaaactaaattgcaagaagggcaaatagagttagatttaccaggatattttcaatattggaattatgctgagagaaagggttattcaggtactgctatatttacaaaaaaagagcctttaaaagtaatgtatggaataaatatagaagaacatgacaaagagggtagagtgataactctagagtttgaagatttttactttgttacagtatatacgccaaattctcaatctgaattaaagagactagaatatagaactagatgggaagacgactttatagattatttaaccaaactagataatcataagcctgtaattgtgtgtggagatatgaacgttgcacataaagaaatagatttaaaaaatcctaaaaataatatgaaaaatgcaggttttactaaagaagaaagagagaagttttctaaattattagacagtgggtttatagacacatatagatattttaatcctgataaagaaggcgtttatagttggtggtcatatagatttaatgcaagaaaaaataatgcagggtggagaatagattatttttgtgcatccaaaaaattagaagatagattagtaagtgcggatatacacactgaaatattaggttcagaccattgtccagttgaattagagataaaataaaaattaattacgataaaaattgggctgtagatataaatttaaagttaactagttttttaatctacatgcctattttttatctaaataaactctatttgttttttctttgcttaacattttctaatgtaaattgatttgttttccccatattataagctaagttaatgatttttttctcgtctttagttaattcacgatttaaaattttcctaaattcatcaaataacttatcataatcaactctttttttattagaatatcttatagttttaggttttatactcgtataaagatatatatctgggactatacttggattgtatatcttaataaaaactttagcagtataatatgcatcatttaaagcattgtgataagacattttttcatcaagttccaatatagaaatagcattttgtaggccaatgctttttcctgctggattattgaaatatttagatgcatgttgttgtatattaatataagatttaggtaaggaacttgatggtagcttgtgatagttgatattcctgtataattcctttaaatctccaactccccaaacacataatatagggtcttgtgatgatataaattttataaaattgttgtagacctcagggaaagtaggcgaatcattaaaatcagaatttttaatattagtcatacgactaataaagggatgtatgtctttataaattgtaggttttacatagctattaaacgtatctattatattgaatttagaatccaatttaattgctcctatttgtataatttcaaaaggacacttttcattggatacagttttattgagttttttatcaaatccttggttaaattccaaatcgaaaattatgtattccataaagtttatctcctaaatttttttattatttcttttactatagattatattataaataaaattaaattttcaaataaaaatacttttattttagtataccccatatttgtaaaaatgttaaactattgtatgtataatattttttccaataaaaaatattgcgaactttttatacttgatatataataatataaataaaaacacgaataaaacacgaataatttgcaagaaaaattcatgaatgtaaggaaaatgaaatttatcttgtatttaacaaaataaaatatacataaaaattatgggagagtggaaaaatggatagtctattatacgtaatagagaaagataaacacactaatgaagaattaagagaaatcctaaaaagcaataaaaatataagatttgtttccttaatgggggttgatttaggaggaaatgcaacagatgaaaagattcctgtagaattatttttggaggatatagataaatttttggaatcagctatacagactgatggttcaagtgttgagctttataatatagctacattaaataatgcgaaagtagatttaatgccagataaaagttgtcattggtatgtagattacaatatggaatatatagacgaagaagtaggtctacctgttggaacattaaagatacctgcatttttaatacatgataataaaaaagtatgttctagaggagtacttcaaaaagcagataagtactttaaaaagtcaatgtatgaaatatttagagaatatccacatgtaataaataacataggaatagattcagtagatgatatagaggaaataatgttaacagcagctacagaacttgagttctgggttaatactcctgaggataaagctgacttagagaaattatatgtatcacaaagcctaaaagagcaatactggaaaagaactcatggtattataagaacttgtttagagaaaagtttaattatacttcaaaagctaggtgtaaaccctgaaatggctcacaaagaggtcggaggaatacaaagttctattagtatagatggaagaacaaaccatgctatggagcaattagaggtttcttggaagttttctacaccattacaagcagcagacaatgaattattagtaagagatgttatagaggatgtatttacatcacatggactagaagttacatttaaagcaaagccaattcatggagtagcaggaagtggtggacatacacatgtaggagtaagtgcgaagttaaaggatggaagtataaaaaatctatttgctccaaaagatttaaaagaagattatctaagtgaactaggatatggggctcttatgggacttctttacaattatgaagtattaaacccaattgtaacagcttctaatgatggatttaatagattagttcctggatttgaagctcctgtatgcatagttacatctttagggcatagttatgagattccatcaagaaataggtcagtgcttgttggattaataagagatatgaaaaatccaaagactgtaagatttgagttaaggtcaccaagccctctatctaacacgtatttagtaatagcaggatgttatcaaacaatgttggatggtataaaagcagcagctaagagtggtcttagtacaaaagaacttgaaaaagagttatctaaaaatgtaggtgaagaaagtttctatttagaaaaagatagagcatatagagatgaaaatgatgtatttgaacattatagtttggaagaaagaaatgcaagatttggaataccaccggctacagtttatgaaaatatgaaaaacttagaaatatatgcttcaaaattaaaatctttaaaacaaggtgatgtatttactgatagtataatagaatcatttaagattggagctatagataagtggcaaaaaaaattaaaaactagaataatagaggctgggattcaaaaaataagaagtattgtcaagatacacacaaaagaaaatatggatgcgcttgatgaggtagtttggaactcaatatcggatttaaagttcaatattatgaaggatactttaactagagaatcactattcactagagtgagagaagctatagaaaataaggattaccagactgcttcagatttacaaatagaattaaagagaagtatggaagaaatacaacaactgtatatgcagtacaagaaaaatatatactaatataacaatttgattttgatatgataaaggcaatcaagtattattaaacactatgagtaaattctcaagtgtaaaagcatacttgattgcctttaattttatgtttgaaattttttaatagtacaatttaactgtaatgattatctattaattctgatatataatcagcaattttctctggatgaataactgttttaaattcttctaaattttttttcataaagtttattatagaatcaaattcatttgatactaatttataaaatatgtttttaaggtctaggtcatcactataaatcatgccaagacccttatctattataaatttagcgttttcaatttcttgtccaacttttggcattttcacgagtactggagtttgtgattgaatagcttcaaatatagttgctcctccaggcttagttagcattaggtcacattctcttattagattatacatgtcgtttacaaatccaagtactttaatattttttagaggttttttatgagttagattgtcatataattttttgtttttaccagtaactattgtaatttctatagaattactatgttcttcaataaattcatctatccaatgcataaaatcctcatctatatcaaataggcctcttcctccacctagaagtaatagtctatatttatcacaacatagttctttactttcaatttgaaatctcttatcaacaggaactccagtaacctttatggagtctggatttattcctttctgaaaaaatctattttttatttcaggagaaggaacaaaatacaaatctgtattttcaaaaacccattccatactatctacaacatctgttataactgtaagtgtaggtatatttatatcaggattttttatcttaaagttatttacacaagcagccgctagtggaaatgtagagataatcaaatctggatttatatcagcaatatactcagaaagtttaggtgtatataatttatgagataaatcatgtcttgaatcaaacgatttcttaaagtaataatagtaattatataatccaggagtatattttgtattgttttcataaagttttaccataggtttattcatcatgggaatacttgcatttataaagttttgtataacaacattatagttactatatttttcaataatacattctttgactgcttttgcagcacttatatgtccagcaccaaattgagcagttaagattaatattgttttatcatctttcattttagccaatttatcaccactttcataaaatatatctgattagagtattatacatttatagaaggatttaatcaacaagaatatttaaaaataactattgtgcagaacatagtactgtgttattatgaggatataagaagttttaacatagtaccttgtaaaacacaatactgtgtatttaaagaaaggatggagtatatgaacacacaatttagaaagggtgttttagaaatttgtgtacttgctctcatatctaagaaagatatgtatggatatgagatagtacataacatctctaaagtaatagatgtaaatgaaggaacaatatatcctattctaagaagacttacaaaagatttgtatttcgaaacatatatactagaatctaatgaaggtcctgctagaaaatactatagaataacttcactaggaaaagagaatttatccaatctgatggaagagtggagagaatttgtaaaggctgttgagattttaataagtgaagatgagggaggtaatgaacttgaataaaactgagtttcttgaaattttaaaggattatctaaaaaaagatttttctgagagcgaagttaatgatatattgagagattatgaagagtatttcgtagatggtcttatagagggaaagagtgatatggagataatagcatcacttggttcaccaaaatctatagccaaagaacttatcttgcagactaaagaaaaaaatattgaagaggaaaaaataataaatacagatgttttgaatgataagtttagtaaatttaaatcagatatgaaaaaaggttactctatcttaaaagatgaagcaaaagaaaagtatagtaaatcaaaagaaaatatagatggaaaaataatgaatacagatatattaaatggtaaatttagtaggtttaaatcaaatataaaaaaggattactctatcttgaaagatgaagctaaggaaaagtacaataaatcaaaagaaaatataaatgataaacttacaccaagtatagaagaaggtgtagggggattatctagacaagttataaagggattattagtagtgttatctttatttctaattgttccagcatttgcgtttgtatgtgctattgtatctgttactattgcattagtatgttcattaattgcttttgttatattaattccatttgtgattaaatttatagcaatggttccagatgttatgatgttttgtattttcgcaaccatagcatttgtagggcttgagatacttgcatggcaaattttattatttgctataaaactaggtaaacaattactaaataattatatacattggataaagagaaaaaatatttatataaaggcaaatgaaaagatggaaaaaagaaaaaaagctactttaaatgatgaagatttgaataaagacattaatgaagattcatataataatgattactacaatagagaagaagaaagcataaaagaaactgatgaatataatgatgatagtataaattttgaggcgatatataaggaccttgaagatatagaaaataagaaaggagaagataaacatgaataaaaaacttgctatatttgctgcagttttattggtaataggtataatagggacaacatggtcagggattttagttatgccaagcctaataaactttggtttagaaaaggaagctgaatttaaaaaagaaaataaactttatcaagaaaaagtaaatattgacaagttagatatatctgttgacaatataaacgttacaataaagaaaagttcaagtgaagatgtgcgtgtaacaacaagaggaaataatgagttttacaaatacaatgtaactttaaaagataagactttagttgtaaaaggtgaaagaaaatatgaaaataaaattaaaaagattaaaaatttcgaccaattattaaatacatctataaatagtatgttttcacatgattatagagaaattataatatatgtaccaaataatgtagacataaatgcatcaagtacaagttcatacttatttgtatatgataatgtagcttcaaatactataacatataaaacttcttatggaggttttagtagagctataacagagaacaaagtaaatagattagaaaacctaaacttaatatctaatagcaatcttcacttgtcaacaaaatcaattttaggcgttaaaaatgtaaacatagaatcagagtcattggatatatcttcagagaatgaagatgtatttatcaataatatagaagagtatatacctgaaaatgtaaatataaaagagaaaataggtagaaattcaaattatgaaagtgaattttacttgtactctaatatgccaattgctaagttcctggacatagaagttccaaattctaaggtaagacttgatataccagtaaataagtataaatttaattgtgatataaagtcaaaagaagcaattgaagaatttaataatgatgaagaatatgacaatgattcatatgattatgaacatagtgaagaacatagcaacaagtatagaaatacgagggaaataaaagggcttttgaataaaaatctgtcgaatttagagaaagaatatactataaaaataaattcaaatagcttagaattgtaaataatttactataataatttataaattgatttaaaagtataaaaatataatctatactatggtataataagtatcgaaagagaattaggagagggatacttatgaataaaatagcagtaagttttttaataattgctactactttattgagtacagcatgtatggattatagcatcagtgcagttgagctagttgattctaaagaatcagcagttgtaaagaaggatgaagatgcaaaagaagaaacaactagtaaaatgattaattctaaaaaaactactaaaatacctatagagataatttcaaaggatgagaaaatagtaaagtacttacagattgatgaagaaagttcacttaaggataaactgcgattaatcttagatacattatcaaatgagtattttaatggtttagacatggaagtagaagttaaggaaaaagataatcttgttaaaataaacttgatagaaccagataaaaaaagtagagtttcttggaaagatgattatttgaatgaacaaaatataatatatactataaataatattattaaaaatgtcatccaagaagaagataatagcatttggattgaagaagtagagatatactacaatggaaaattaatagaattaagataaaaaaagatgtgtttttaacacatcttttttttgttttttaattcttataaaatccttatatttatgatttagaatgattcttgtaaataagtttgacaaaagaaaggatgaaaattatgaataattatattttgcaggtaaaaggagtttctaaaaaatttaaggagcagatggcagttgataatatttcactagcaattaaatctaattctatatatggattattaggaccaaatggagctgggaaatctactttattaaaaatgataactgggattttaaatccaacttcaggaaaaataatgtttgagggacatagatggactagaaaggatttatcaaatattggttctcttattgagtctcctgctatatatgagaatttaacagcacgagaaaatttaaaagtccatactactttacttggtcttcctgactctcgaattgaagaagttttagagactgtcgacttaagagatacttttaaaaagcgttcaggtcaattctctctaggtatgaagcaacgtcttggtattgctattgcattattaaatcacccaaaacttttaatcttagacgagcctacaaatggtcttgaccctattggtattgaagaacttagaaaattgattcgttcttttccaaaacaaggaattacagttattttatcaagccatatcttgtctgaagttgaacaagtcgtagatgaaatcggaataatttctaatggagtaattggttatcaaggagaagtatcaaaagaacaaaacttagaaaaactttttatgaaagttgtagctgaaaatagaaagagaggggagtaatatggaaagatttattagagtggaatttcaaaagatgaaaggaacttttggaatgaagttgatatggatagttccagtgttttgtatacttttgtgtggactaggtggagggcaaaatgctgctttcaactggtggtatacgacatttcttccaggagcattaacattaatatcttctttaatagtattaaaagatgaaaaaagtaaatatcgtggtattttaccattgccaattgaaatgaaagacgtttgggctggaaaaatgatttactgtattatttgttgttctatagcatcgattatttctgcaataggtgtagtttttgttgggataatctataaagaaactatttcaataggtcaaaatatcattgcaactatattaattattttactatttatgtggcagattcctctttgtatgtttttagcttcaaaatttggtatatttgttacagttctaacaaatatgttctttactattgttggagttgctgttttctcaactacagaaatgtggtatgtatttccatattcgattccttcaagattaatggttgttgtattgcatattctaccaaatgggcttcctgtaccagaggggagtgaacttttaaataatgctgttattttaccaggagtattaatatctgttattttatttgtattatttgctttagttacaagagcttggttcaataatagagaggtgaagtaatatgagacaactaataagaatattttgttctgatttaataaaattaaagagaaattttataatactaatgcacatttgcattgctttaatggggatgggattgtttttatggtattataaggtttcaggagctgataatatattaaagatagtagcatatttacaagttatagcaatagcttttcctttattgtcaggtgttgtgtgttcaatgtttgttgaacaagaatattatgcagggaattataaacatatgttaacaacatctaatccaaaatatcttactcttataagtaaatatataatcttagtatgtcttggttttgtagcaacattagtgtctgtattaggttttaaatttggtatatctaaggcttactttacatcaagcttttatatgatttcaattctaattttaattgggtgtaatttatttgaatacatattacatttattcttaagtttaaggttcggaaaaggaacatcaattggagtaggtatagttgaaatgttactttcagcattattattaactggattgggttctggcatttggcagtattttccttgtgcatggggtgttagatttataactatttggtcgtctttttcaagttctaaaacggttgaatatataaaggttgaatcaataaaagcatatcaatcaacaggtttaatgtgtggttttgtaacaattttagcatttgtaattttatgtatttggttttctaaatgggaaggtaaaaagtcagaagaataaataaaaattgactgtttatttacattatatttatattattatgttaaaatataacttagcaatgaaaaatataaaataatcaaataaaaactggttaggtattaattatgaattaattaaaatatttggaggatatggcacaaatgcttagaagtaaaaaatctaacaacaaaaaagttgaaaagttaagaactatttttataaaatatttatctttattctttgttatgacaatttcatttgcacttcttttaatgttatcattttctgtattattatcatcaggtgtaatattaccagctaattattcagaaaaacaatttgataaatataaagaaaagattatttcaagtgaaaaagcaattgaagatataattccaaatttatacgagtatggtgtttatactttagatgggaatttgatctcaggcacttttaataaaaaagaatcaaaacaagtatggaatttaatgagagatattgaagaaaggcatgcatattcagaaagttatataaagttttttaagaaagatgaagtttttataataaaatacaaactagtatcagagtatagttctccagttttaagagcatatttaccaaaaccagagatgttaggtatgattatttttagtataatattttttattgaaattgttatattatcaaaagtatttggcaagaaatttaatattgaaatggagcttttaaaaaatactacagaaaaaatagaacaacaggatttagattttgttgtagaatctagtaaaatttatgaaattaacaatatccttttttctatggataaaatgaagttggcgttaaagaattctttagaaaaacaatggatgctagaagaaaatagaaaggaacagatatctgcactggcacatgatataaaaacaccattaacaattatacatggaaatactgacttattaattgaaataaatgaaaatcctgagttattagaatacatggaatatatctcaaagggtgtcactcaaatagaaaaatatattaatactttaatagatatatcaaaaacagagaatggctatatattaaataaagaagcaattaatatgagtgagtttataaaagatgtcttactgcaaatagaagcattagctagtactaaaaacttagatgtggagttttataaacaagataatttgcctaaaaatataactatagatagagaactgttattcagagctattatgaatataatttcaaatgctatagattattcaccaagccagagtaaactatacataagtgtatcagtaagtaataaatacttaaaatttgtagttacagattgtggaagtggtttttctaaagcagatttgtcaaaagctacagaacagttttatacaggagatttgagtagaaattctaaatctcattacggaatgggactttatattgtaaataatattgtacaaaaacataatggaattttatatattgaaaattctgtgaaaactggtggtgctatggtaacaattgaaataccaatagtttagtaaataatatccattttgtaaatacctaaattttatgatttataggtatttataaaatggatagtttttttgattttatatattagttaaatctgataaaaagttttcaaacataactccatcatttctatcagtatcaaattgagatgtgtaatttatagttttatatataaaatctgttgcagtattaaccgctactcccaaatcatgtttatttactaacataccacaaagtatagatgtgaatatatctccagttccactgtaagaacaattattgtatttgactgatgtaaagaatacatggtcattatctctatcataagccaaatttaatatattatcatcttctaatataccagtaataacgactttgctaggtcccaaatcagatacagattttgcaatatatataagctcatctctattataatcgcttttagtataatcatttccagttaagaaacaagcttctgttaaattaggagtagttaaatctgaatgtttaactaattctttaatttcctgtctcatttcttctgtgaatattggatacataactccattatcacccatcacagggtcaactacgataaaagcattgggataatcatttataaaattagccactatctcaatttgatgctttgaacccaaaaaaccactatatatactatcaaaattgacttttaaatttttccaaacatttgaatattttaccatttcatcagtaaagtctaagaaagtaaattcaggataaccagtttgacttgaaagtatggccgttggaaatggacaacattgaacctttaatgctgaaagtataggtatagcaaccgataatgagcattttcctattccagataagtcattaattgctgcgacttttttttgcataaaaaaccctccattagtatgtattaattataatgataccaaaatatttatatacatatatattactataaaaaaaagaaaaaagtagattataaaataaaaaattgtaaaaaaaacagtgtattgatacaattaatttttaatattggacataataaaatagagaattattaaatatgaaaattattgtatatgacagaatcttctttgtaatttcatttataaggtgtactatttgggaggtgtagctttgaaaatactgaaaaataagaataagtacatcaaaggtataatggcatttgtatttttgtctttagctactacagcaggtgtatttttaatcaatgatttaagtatgaaaaatatggaagaaaaagtcatggaatctgcaaatgttgaaggtgatgatgtaaaagaccaatataaactattgcttgaaaacttatttgactacagaaataaggcaatattagagaaaaatgaaaacattttaaaaggtctttatgagacggataaaaaatttggtctgtgggcttatgaaaatgaagtaaaaaagatgaagtatttagaaaactggtctagtaagcaaggtgtaaaatttaaagacataaagacaagggttaagattaaaaaaataaaagaaaaagaaaaagacctctatggtataatctgttcagtatcgactgaatataagtattcatatgaaaatcaaaaggacaaagaaaatgcctttagaataggtacatatcattatctaaatgtaaaaattatagataatcaatatgtcataactaaagagtggtacacagacccttttgcagactctttaaatttagaaaatataaaatctgaggatataagaaactatattgggcaacaagatggtgtagagttacagcttacagatgaacaaaaaaaggctatagattatgcacataaatactgtggagccgcagctgatgaagaacatggtatgaaatttaatccaaactatagggattataatccagaaggtggagattgtgcaaactttgcatcacagataatgtttgaaagtggaaggttcaaaaagaactcaatttggaattatagcgagagagcaggtacaaaagcatgggtaaatgcacaagcttttaaaaattatgcactgtatagtggaagaggttcattaattgctaaaggttcctatgaagaagtatacaaagaagcttataatttacgtccgggggattttgttggttatgagaagaaaggcagaataacacatgtttcgacagtgacaggattagactcaagaggatatcctttggtaacttgccataatactgatagaatgttggtgccatgggatttaggctggagtgataagtccataagattccatataataaaaataaattattaaaaaattataaagaaaaataaagtgtaaaagataataatcatttaaaattataaagtaaaaaaattgattattaatgtataaaaataataataattgacaaacatagctatatatgatagagtagtaataaggttacagaaaagagtagctaaatatttgtgtttttttaggaggatttattaatgaaaactggtgtagttaaatggtttaacaacgaaaaaggatttggattcatatctgtagaaggtgaaggagatgttttcgtacatttctcagctataactggagatggatacaaaacattagaagaaggacaaagcgttgagttcgaagtagtagatggagctaaaggtcctcaagctgctaacgtagttagattataattaaaaattcatatatattagtgttctagtaatatgagagataagccgctaatcatttagcggttttttcagtttttgtaaataaaattaatagcaaaataaattaaaattattaaaataaaatcattaataatgagataaatatgttaaaattaatagtgtagagtaaaattattatggctaagtttaagtcaattaatttttagtaaattttctaaaaagagaataagtgatactgatagaccatataaaaatattaataaagcataataagattaaaatgagcaaaggaaaaacgcttgttacagcgtatagtattaagaatacttagaaaataagaaaggagaaagttactgcaaaaaagtaacattataaatattgagtaatatttataagttttcagtaacggtgggtagtgtaatgaacatattattctttctaacaccaaaaagtgaagtagcatatatatatgaagactacactataaggcaagcactagaaaaaatggaatatcacaaatactctgcaattccaataataagtaaggatggtaaatatgttggaactataacagaaggtgattttttatggacattaaaaaacgatttaaatctggacttaaagggattggaagatgttccagtgacagatataaatagaaaaatggataattctcctgtttccatcaacgcagatattgaagatttagttataaaatctttaaatcaaaatttcattcctgttatagatgaccaagacacatttattgggataataaaaagaagagatgtaataggttactgttatgagataatacgtggatataaaaatttagctaatgataattaaaaatcttatttaaacttttaagctgagttctttacaataaaagaatgataatatgaaactgaatatttaaactttaatataaaaagctgtcttttctaataaatattgtgaaaagacagcttttttatatatgaccttatgattaatcgttgtattttacaaggtttccgtacttagcattaagagcatttatcttatttccataaacttcattttgtttttgatataataaacttttttcaacttcagccttaacttcatcaaatgtagactctgtactttcttgaaggtcttctaattttattatatggtatccaaattgagttttaactggttcacttacttcacctttagccatagagaacacagcttcttcaaattcaggaaccatttgtcctctaccgaatgttcctaaatcaccacccatatctttagatgggcaagaagaatgtttaagagctgcatcttcaaaagatatttcttctgattttatttgagcaagtatttctttagctttttcatcactatctactaatatatgtttagcagttgcactttctggtttagagaaagagctcttattagcttcaaagaattttactttttcatcttctgttacattaacactagataaaactttatttatagcaaattgctttaatacattttcttctatctttttcatttctaatttaaatatttcttcttcatctaatttttcttctttagcatctaagaagaataattcttgattcactaaatcatttaataagtgtttttttccttcttcagttttaaattgcatagcttgataagggtctaatgattttaatgcattttcaatatcaatattagttatctctttttctccaactgttgctaaaacttttttttccataatagttaactccttcatagtgtatttcattattaatataagactaccatcttaaataatatcagaaaataatgtagatgtctaatatttaaagccatattaagtcaaatagaattaaatttagtagaacaaagttattacaattaataaaagtgagctcataatacccactacaccttcatcatctttaaatttaagagtttttactattgaataataaaggtatattccagtaaaaataatctttaaatacaagaaaaataaactctttgggtatattaaaaagctaaaaagtgtaaatataaaagcaagtagagtacttatcctgtaaaagaaatctatttgtgtaatgtctttatattttatcataaacaccgaatataaaatgatgaaaataattgcgacgattgcatatatggtaaataacatattttcaagagtaccatttgaaattactatccacttataccacataattggccaaaataatagtgctaagaacttaaaataattatcaaacaacttttctttatacattcatcaaacaacctttcttaacaaaagcatatatttgtttttagaattttaaataatatgatatcattattatatattaatattgaatttatagaaaccaaaatttgttaaaataaatatatagattttactgttaagccagttaaaattactactatttttattatgaaattggatcaaatatgtagaaatacggcaaattagttaatattaaatatttattatttccaagttgtaaagactgtttttttaatgataaaaattctaatcttttttgaaagaaagtaatatccacattaagtatgtctgccatttcataaacgcaagtgatgccagaattaattatgtttattatatcttcttcagtaattaagaactcacaagcccattttaaggctttattttcgcacttatctataataatttttgtataataatcgttataagaggatacatagtatccaaggctagtgaaatgatgtccaagttcttcagctaagatggatgtcaatttttttgagttttgttttaaattactgagtaatgatataattttaataccatgtttgtttatatatagcccttctaaatcacctgcaatataagtggtataatgaattattatctcttcttgagaagctaattcaaaaagcttatccaaattattcataaaaatccccctaaaatagaatgtatgtttgcctttaaattatattaaaagagcagaaaaatagactgctcatcatatggtttatttttttttatatttatttagtaaaaattctatataatcattaagttgttcttgtgcttcttcaggtaactcttcatgtggattttttctatgtgcagctactgtatcaatattttccttaactaaggttcttccaagaaggtaatcaactgatacattaaatacatcagccaatttgtttaaaatgtgttcatcaggaaatctgttttctgtttcatagtaccctaagactctttgggaaacgcctactttttctccaagttctctttgagtcaatccaaattcctttctaagttctcttaatcttttggcaaacattataacaccaccttatgtatagattataacaaattgttctaaaaaataaaactaataaaatataaaagaatatttttttctaaaatctattgataaagaacaaatgattctatataatctaagtgtggaagaacaaaatattcttaatggtaatggaggtataaaacaatgtttaaaaataacttgaaatattatagaaaatgcaaaggtatgacacaaattcaacttgccagaaaggctggaattacaaatgactatatatctcaaatagaaagaggtataaaaaatcctggtcttcttatggctaagaagatttctagtattttagaacaaaatatagaagaagttttttttatacagttatagaacaatatgttcttgaaagttgtgagattagtaaaaaactgtgcactaaagagattattgtaaatttgaagctaataataagtatataaaaaaggagaagtactatggaaaacaaaaaagatatattatttaaagaaacagatgaaagattacataattataagtatttggatataaagataaagaatattaatttggacataaaaagatgtgagaatgaatactctggatgtggagcaatggtatatacagaaaagactagtaacacatataacataagttcttctgtggaaaatgaggtgttaaaaagagaggaaagattaagaaaattaaaaatggaaaaagaagatatagaaatagaaaaagagaagatagaaaatgctctaacatgtctaaatgatatagaaatggaattttttaatcttttttataatagtaagacaaaaaacaatatgacatatatttctatgaaactacacttagatagaacatcttgctacaatttaaagaaaaaaatgatatttaaattgagtgagatattataaaaaatatgacaactttacaacactttatatacactattgcaacactaggcaataaaatatgtgagataatgttattgtgaaagaaatccatattgaaggaggtgataaattgaaaagaataatattacctaaaaatatagaagatatttgacaggaataaatgagatgtatatttaaaaatgacttatatcatttatagtaagattatcagattaagcaagaatatttagtgatagtgtggtgattatttgcttaaatacaaggaaatattagaaacaattattgagattctcaaaaaaaactttactgaaagtatttttattgatgatgaaagtgtgcaaggctctgaagggtcttgtttttttgtaagtatactatcagttatttgtacacctataatgttaaatacgaataataaagatattgttatctctataaaatacttaccaaaaccacagtcaaagagtattagaatgtatgaaatttcagatgaattaaataagttattcaacagaaatataaaggtaacagacagaaaattaaatataacaaagctagaacaaagtattaaaaaagaagagtcaatttatgtattgaactttacaattacactaaattatctggatagtgtatatgaagaagatgtagtatatgaaaatatggaagaaatcaatttaaatttaggagagtgatagtatggctataggattaccaagtatcaacatatcatttaaggagctagctacaactgttaaagaacgttcagctagaggaataattgcaatggtgcttaaagatgctaaggcactaggtcttaatgaaatacatgaaaaagaggatataccagttgatttatctgctgaaaataaagagtatataaatttagctttgatgggaaatgttaacactccaaataaattattagtttatgtaatagaaggagaagcagatattcaaactgcattagattttttagagactaaggaatttaattatctatgtatgccaaaagcagtagaagctgataagactgctataaaaaattggataattaaacttagagatatagataaggttaaggttaaagctgtattaggaaaagttgtaggaaatcatgaagggataattaattttactacagaagatgtgttagttggagaaaagaaatacagtgttgatgagtttacaagtagggtggctggacttatagcaggaacacctttaagtcaatcagtaacttatactaagcttagtgatgtagttgatatacctaagatgacgaaagttgatgcagaatcaagggttaataaaggagagcttatacttattaaggaagcaggggctataagaattgcaagaggagtaaattctttaactgagttaacagaagaaaaaggagaaatgttccagaaaataaaaatagttgacactttagatattatacatagtgacataagaaaggtgataatagatgactatataggaaaggttactaacagttatgacaacaaatgtttattgatagtagctataaaaagttatttagaagaattagaaaagtcagcacttatagaatctgattctactgttgaaatagattttgaagcacaaaaatcgtatttaaaatcaaaaggagtagatttatcttatatgacattacaagaaataaaagaagctaacacaggttctaaagtatttttaaaagcaaaaataaaagtacttgatgctatggaagatatagatttatcaatagaaatataggaggattattaatatggcaaatatggaagctagaaatgtaatgagtggtacttggggagaactttggcttgatggaaacaaagtagcagaagtaaagaagtttcaagcaaagatggaatttacaaaagaggatattataatagcaggtcaaatgggtactgatacaaagtatatgggatataaaggaaaaggttcaataactctataccatgttagttcaagaatgcacaagttaattggagaaaagataaagagaggttctgaacctagatttgttgctatatctaaattaaatgacccagattcttatggagcagaaagaatagcagtaaaaaatatagcatttgatgatttaactttagctgattgggaggttggagtaaaaggagagatagaagcacctttcacatttactgagtatgattttcttgatataatttagttttatatttggttttatactgatatttagtagatatatacttaataaatttaggtagttaataagtaaaaaagttagttgattgaatttgattgataaaggagcaaataataatgaatgaaaatggattatcaaaaaatataaacatagtagatttacttttaaatgcagatacagaaaacttagaaagaccaagtactatagttgaacttaagagattatcaactatatttgggcaggaatttaaagtaatgtgtagagctttaacaataagtaaagatgaagagatacaaaatacttgtcttaaaattgatgaaaatatgaaaacggatatagacttaccggagatgcagatgcttacaattatagaaggtgtttgtgatttggatggaaagcttttatttaaaaataaggaactaatggataaatttaaggctccaacaccaaaagaattggcaagaaaactattattaccaggtgaaattaccaacctatatagaatacttcaagatgttatgggttatggtaaaaatgcagtgatagaagaggtaaaaaactaatagggacggataccaagactacaataatgtactattattggaagaaaaaaggtataagaccgtcccttttttatgcaatggataaaggcgaattaaagcttattgaagcttttttcgccttagaaattgaggaagaagttgaaaaaatgaaacatggatatggagtgtgtcctttgacaggaggtggtatgtaatgggaaatgtgagagaagaaggtataaatatgtatcttacagataattacacaccaaaaatgaaccaaattatatcagtaactgataattttaggagagcaactgtggctgtttcactttccactaatgtaatggctagtagcataaaaaattctattggaagtgcaagtagtagagtaaacagtttaaattcctcgttaagaaaagttcaaactactgctagtagtgtaagttcaactatggcaaaattaagttctagcataaatgctgtttcaggagttattggaagtttaaatggaagtattatgagactagcaataactatagctatgattattgattattttaataagttgattcaaaagaaaaatgagtttaattcaaatattatgattatattaatatttaaagctaaaagtgatgaagtagaaaaaactaaaaataaattacttggaaatttaaaaaagattggtggcaagatttggaatatcgtaataaaagcaaaagatatgactaagagagtgataagtagtatcttgggaaaattaaaacgagtagagaaacgtccttatcaaggaagtattaatcttaaagatatggtaagtagtgctatggctagaattttgcctaagttaatgttgtttaaaaatactttttggagtggtgtaatagctataaaagatatggcaagtagcattataagtaaagtatttcccaaattgagattgtttgcaggtaaggtatggagtggtgcaatagctgtaaaggatatggcaagtggaatacttggttcgataaaagggaagatatctgatttgacaaatggtgctactataggtgtcgctgtgaaaaagggtgttgacttacttggtcaggaacaaaatcagaaagttgttctagaaagtgtaatgaaaagaaatactggaaaaactagccaaaaagatgttgataagtattatgacagtttagtaaatatggcaaatgatacgccttttgaccctgaagatgttgttgcaatgggaactaaagctaaaatgattagtaatattactggtggcaaaaaagaaaaagatataactcaagctatggtagatgttagagctttaaatatgaatacaagtagtgaacaagatgtatcagcagctttcttaagtgcagcaaaaggaaatatggaatctcttaatactctggtaggagaaaattataaaacttttgatgaagcattggaaggcataagtgtaaagcagatggggttagctaaagaaatgagtaatacaataccaggtataatatcaggagctcaaacaagcattaacaatggtttgaagagtattgttaaaccttttgatgatattttaggtcaaggactaaagaaaataaaaacttttatagaaagtggattagggaatttagctggcttatctgaaaaaatggctggtaaaataggcaatgtaatgaatggtaagataattattggcaacaaatatgaccagatgcaatctagaagtgtaaaaaatggaaaagagttttctgattctactcaatatcgaatttctaatgaggctgaaaagcgtaaaatgatggttgaaaataagcaagaacgttttgaaaatcatgcagcaacaatgatagggaatgcaccaaaagcaattgttaacgcaggaagtacactattacaaaatattgattttacagcattaatagattcactacttccagtagtaaacttagtaaataatttactagatagtataaacaataaatcaccaattgcacaaggattaataagtatatttggtacaatagtaactacagcattccaactaatcggacctgtagttgaagctgttagtcctattatcacaagaatttttacttttttaggtgaatatgcacctcaaataaacaattttatagagacactgggtgttatttggaaaactgtatgggagaccttaggacctctgttggaaactggatggaaaattatagagccaatattgggagctttttttaacatattagataaagtatgtaaaatagttaaagatatatgcaaatggtggcaaactatgattaataagataaaaaatggaagcatcacaggaacagttttaaatctagtggaaaagagtaaaaaaaattacaaagataatccatatgctggaacaaaggctggtgattctggtaaagcttattcaagtaagaaaggtaataatgcatttggattgaactatgttccttataatgactatcaaaccagactccatgaaggtgaaatggttttaactaaacaagaagcaaatcaatatagaagcagaaaaaatggtggaaatataaacatagctaagttagctgatacaatagtgattagagaagaagctgatatagaaaagataacatcaaaattagttgcaagtatccaattggcacagttagggggtgtcttataatggaaatgtggcttagacaagcagaagatagatttagatttccagtatttccatcttcctttagtattaatggaaaagctgctgtaaactcttctagtatactcaaaataggtgaagtagcaacttttggtggtgtagctcttaaaagcatttcaatatcaagtttttttccaaataaagactacactttctgtgactatacaggttttccatcaccatatgattgtgtaaataagatagaaaaatggatgaaggaaggttttatattaagatttacaattacggaaacaaatataaatatggaagtcataattgaagggtttagttatgaagaaagagatgggactcgagatgtatattttacattagatttaaaagagtataaaagaataaagataccaaaagtaactccaaaacaataactattatagataataagttgtaagtaactgctgatagaattaaatgaaaaggcaggtgattttttattattaagatttgggtacacataaaaaacggaagtatatatgacataactgacatagtagacaaggtatcatggtcaggtgattataaatctccatcaaggacactagagttttcaataatacaatcatcatttgatgtaaatttccaacaaatcgatataccaatagctagtacagtctgtttctatgtagatgagaaagaactctttagaggaatgataattaataggtctaaagattcaagcagtaatgaaattagttttgtatctaaagatatgggatttttacttacacaaagtgaagtgtcatacaattttaaagataagttagttgaagacatagcaaagcaagtatttgctgaaaataggctttcagttggaacaatagcaaagaccaatgtcaagtatacaaagatgtttataggagtaaatggttatgacacaataatgagtgcatatacagaggcaagtaaaaagacaaagaaaaagtatatgatagaggctaatttagataagtttaatgttattgaaaaaggaactgttacattaagtgttatgtttgaagagggatttaatattataaataccaccttttcggagagcatggaaaatgtaaaaaataaagtaatagtggtagaccagtatggaagcaagattagcgaaaaaatagataatgaaatttttaaggaagtaaatgtaataatgcaaaaagtaattcagcaacaagaaaatcaagatgtagatattgatagcgagtttaatgggatagaaaaaagctgttctcttaaaggttatggagatgtaagttgtataactggtagaggagtaaaagttaaagattcttatacaaagcttgtaggactattttatatagatacagacaaacatacttggcaaaatggagaatatcaaattgagcttgaacttaattttcaaaatcttatggatgaaaagtcagcaggacaggatgaacctaaggaagaaagtaatttagggggagaagattatgcaggaggaaaagagtttacagcagaatttacagcttactgtcctagaaaagaagaaggtggagatacagattgtagaaagaaaaaacttgacccatctaaaaaaacttgcgctgctcctatggttggtaaatatgagcaaacttattatacaaaagagtttttaaataaacatcctttattgaactatggagatgaaatacaggtaattacaggagtttctggtcgtgatggagtctataaagtaaatgacgtaggacctgcaataactatagaaaaaaatggaacataccatatagatattttatttggaaatgttgaagaagctagtaaatttggaagaagaaaaggaaaaattattattggtggttattctggtaatgtatctgataaagctaaaatagtaatatcagaggcaaaaaaacatctaggtaaaccttataaatggggtggaaatggaccaagtagttttgactgttctggtttaatggtctactgttttaaaaaagttaatgttagtttgccaagaacgtcaaatcaacaatctaaaaaaggcaagaaagtagaacaaaaaaatcttcaagcaggagatttagtattttttcataatccagtcagccatgttggattatatataggtaatggagaatttttacatgctccacaaaaaggtgatgtagttaaaataagtaagttaagtagtagaagagattttaatacagctaggagagtattataaaaggatggtgatataatggctaatccaataaatgaatttataggaataataagagaagaaggaaagtatcataatcaaccttctttttttattggaaaaattaaaagtaaattaccagatttaaaaatagagacaaataacatcatattagaaaaagaagatattttgatagatagttggatgattgatagacagctagaaacatttgacacagaaacaaatcaagaacaccagcatgaagtaaaaaatccttttatagataactttgaatctggggatatggtaataatgtttagaataggcgaaaaatttgctgttgtaagtaagttggtgagcttataatgagtacaatatttccttttataggtgtcccagaggattatatcttacctaaaacagaagaattgccaatctttcgtgaagtggcatgggattttgaaaaagatgaacctattttagaaaaaggtgactttaaaataattgaaaaaaaagaagccttaaaagtttggatatacaagtgtataaagacaaatagatatgaacatgagatatactctttagaatatgggacagagctttcagaactaataggacaaaaatatacaaaaggtcttacagaaagtgaagctagtagattcataaaagaggcccttctaataaatccatatatattagaagtaaacgtaaaaagtgctaactttaacagagacgtattgagtgcaaatgtaaaagtatccactatctatggggaggtggaaataaatgtatagtgaccagacatatgaagtaataaaaaatagaactcttgaaaatattaatcttgatatttataaaggagaaggttcttttctaaacaacatggtatctggaaataatctagaactttcgaagatatatctagaactttcaaagatacataaaatggcttttatacaagacacatataaccagtttcttgataaaagagtcaatgaatttggtgtatatagaaagttaggtacagagtcaaatggagaagttgaatttattggagagaaaggaactgtaataaataatggcacaataatatcatatagagatttactatttgtagtaataaaagatgtaactattggtagtgaagaaggtgacaatagcccagttcaagctctggaagttggtaagaaatataatttacctacaaattgtgaatttaaactagttgataatatatctggagtaacaaagattactaacacaagaagttttgaaggtggtacagatatagagacagatgaagaactaaaagaaagattttataaaatccaaagaaatcaagctacaagtggaaataaagctcactatgaagaatgggctttggaagtagatggagtctataatgttaaggtttatccaagatgggatggtccaggaacagttaaggtcttgatatttggggaaaataatcaagctgttgatacagaaacgattgaaaggtgtcagcaacatatagatgaagagaagcctattggaccaactataacagttgtgacaccattaccaatagaaataagtataagtgcagtaatgaaactagaagatggatatacattagacaatgtaaaagaatctttcctagaaagtataaatacatactttagagatattagaggagagataatctatacaaaagtcatgggaatacttataaatactactggtgtacacgatttaagtaatctacttataaatggaagtacagataatataactattaatgaagataaaatacctagtgtaacaactgttaattttagtgaggtggaaaatcaatgaagctaattgataaactaccatcatttgatagaaattacattgtagaggagatacaaggtgcatacgatacagaattaaatattcttaaagaagatattgatgatacctttaaccaattatttgttgatacagcgacatggggattagatatgtgggaagacatactctgcattgaaaaaaaagaacttgattttgacacaagacgtagcaatataaaagctaaaatgagaagcagaggtactagtactattgaagttataaaaagtatatgtgaggcatatacaaaatcagaaacagatataaaagtttatagtgatgaatttacattcgtattgagttttatagcaaataactgtgactataaaactcttttagattgtagcgagatgattgaaagagtaaaacctgctcacttattacactatttagaaccaataatactagataaaagtatggtctattgtggtggaggtatggtatgtagtgaagaggtaaaagttcatccatactttgaaccaattataaaatgtagtgctgttgtaaactgtggagctggaatgttaagtagagaagaaataaaggtttatcctttaagcattaaatgcattgaaaataattgtaagattaatatagctattgcaaatgatacaggcgtagaaaatgtagtagtttatcctaaatcggaggtggtataattggaagaaaaattttatataatattaaccaaaattggtagagaaaaaatagcaaatgcaactgcactaggagagcttgttggattaaccaagtttcaagttggagatagtaatggagaatattatgagccaacagaggaacaaactgctttaaagaatgtagtttgggaaggaaatataaattctctaagaattgatgaaaaaaatcctaattggatagttatagagactattttaccaggaacagttggtggatttatgataagagaagctgctgttctggataatgagaataatataatagctataggtaagtatccagagacgtataagccacgtgctgaagatggcagtattaaagatttggttgtaaaaatgattttacaattgtccaatacttcaaatgttacattagaagtagacccgacgttggtttttgtaactcaaaaggatattcaagatttagatgataagtttgataaaaatataaaagaaataaaagtaaaaattggagatacagatatattaactacagattctaaagatttatcaggagctataaatgaggtagttaaaaaaatagaaaatatatcttttgatgatgttataagtggtcaaatacaaactgatatatcagtattaaaaaatagctataacaaattatctgaaaaagtgctagatatattaatatacctagaattagagtcagaagtaactgtagatgaggctggttattggtatgatacattagcaaatggaaataacatagtagctatagaagggcttaagttagatttaaatagaaaatgtataacaggtgaaattggtaatgtgatttttagagatgtagtattaccatttagtgcaaatagagttagatatatacatgatatggataataactttgttgagacaaaatctagtaacacttatttaaaagaacaaaaagatataactctaagtaaatattcatatgaaataagataaataaaggaggtagtactaataatgaagcaaaataaacttttacagcgtggtgcttattttaatgataagaacatattgattgatgattttgataaaagatataatgattatgattttgtagaattttttactggtataagtaatagtacctttggtttaaaatcagatggtaatttatatgcttgtggcgataatacaggttttcaactaggacttggaaaagattcgtcagagagaaggatgtttagtaaagtaaaaattgataatgtaaaatatgtatcttgtggttcaaaacacagtgtagcagtaactaaagatggatttgcatatggagcaggaacaagtaatgtaggtcaattaggtgtaattgagtctacagtatattatgaatttactaagctaccaatagatgatgtaaaaactgttgcatgtggttatgactttacatttgtgcttaaaaatgatggaacattatattcagcaggtttaaactcaagtggtcaacttggactaggtgatactaacaatagagctacttttactaaagtaaatatagatagtgtgaaagatgtagtgacttataatcaatctgtatttatcataaaaatggatgggacagcacatgcatgtggattaaattcaaatgggcagttgggaattaatagtactttaaataaaagtgtatttaataaaatagaaggtatggataatgtaaaacagatagcgtgtggtagtagtcatacaattcttattaagaatgatggaactatgtatactacaggctataatggagttggtcagcttggtacaggaaataataataattcaattgtatttactctttctagtataaataatgttaagtatgcttcttgtggaaataatcatactatgatattaaaatacgataatacactgtttagtacaggacaaaacaattatggtcaactagccaatgccaataaagatgtagcatcaagaaatacttttgctaaggttaatgtagaaaatataaaagatattaaatgtggttctcaatttaattttttaataaatggttcaaaagagatatttgtatctggctgtaatttagcaggtcaacttggttcattttttcatacaacttttctgtatgagttttcaaatgtgcaatcttcaaatttagataattattcaggtttattggttaatgatgattatttatatgttacaaaggacaatagtgaatttttaaatgtaaagttaagtgataattttcaagattataagaagatagagttaacagatagcaatatgtttattgttatgaatgatggtacattgtatgcttgtggtttaaataattatggacagttaggattgggagatactgttaacaggtcagttatgactaaggtggatatagataatgttttggatataaaaggaaacggaaactcaacttttgtgcttaagaataatggaacattatattcatgtggtttaaatagtaatggacaattgggtttaagagatgaagttaatagaaatatatttacaaaaatagaaatagagaatgtaaaggatttttgtgtaggaagcaattatgtcatagctttaaatcactcaaaagaagtatatggatggggaaataatccttataataatatagaaaaaacttctaattatccatataagcagggaataagtaatattgaaaagatagcagcatatgattattctgtatatatgataaacagtgaagggaaactatatgtttctggatacaattataattatcaattaggtaaaggaaataatagtaaccaaagcaaagcattagtatctcaatgtagaacaaattcaacatcttctacatcaaatggacttagaacgttacctaaaataactaatgtttttcctttttatgatggttgtgcaataattgacgaaggaggttatgtttatttaacaggatatcatggatatttaagaacattaaatagcagtccaagtatatctgattattcaagatatggaacttttattgaggctacaaattcaaatcataatacttattttatacaagagactgattttagtggaattgaaaaagtaatagggatgtcaaataatatattattttttaagaaaggaagttcatatattactggatatccaaaaacatttggctcaaccattactggacatagaagttatactagtattaattctgagagttctaatttaggaagtaattttataatatatcatagtaattccaagttatatggaaaagggattgctaatagtgggcaatttgggaattcaacaaatatagatggcacaagtaactatgatacaggattaaaagacataaaagatataattgtaaaaggaaatactgtagtagtagtagataaaaataacaatatatatgtaacaggaatgaatcagaataacaaacttgggataggggaatataacaacgaaccagtaaaaaaattcacaaatataactgaacaatcaaactcatttatatttatggatgatataaaagaaattacaacatcaagaaatacaatgtttatagtaaaaaatgatggaacagcctatgccacaggaaataatagttctggacaattaggattaggtgacacaataaatagaaataagttcactcagataaaccttgataatataaagaaaatatcaacaagtatagatggtaacacaacatttgcaattagaaatgatggaacactatactccacaggattaaataccaaaggacaactgggattaggtgatatagtaaatagaaatacatttaccaaagtaaacatccaaaatgtaagagatgttgttttagggactactcactcgcatgcaatcaaagatgataacacattatattcatgtggagaaaacactcatgggcaactgggcttaggaagcgaaagcaaccatccagacgtattgacatttactgtaaacaatataactaatgtaagagatgtgtactgctcagatacaacaacatttattgtaaaggacacaaacattgcatattgttgtggatacaataataattcacaactaggtatgggaaatactactgaccagtatagttttataaagtgtatggaaaatgtaaaagaagttataccaaatgaaataaatacctatataataacaatctataatactgcatatagtacaggtttaaatactgattattgcttaggtctaaatagtaatagcaatcaaagttcattttctgaaattccaatttcaaatgtagtaaaagtagctccaaacagaaataatgcagtacttttacttacaagtgaaggggatgtatatactgcaggcaaatgtagtaatggttcaggtacaggaagtgagactccagagaagattaaaaaaatagcatcaaaggcaaaggatattggaatgaattatagatgtggacattatgtaagtgataatggagacctatatggtacaggttttaataataatggacaattaggtgttggtgatgtaacaaaaagagatacatttataaaaaccaatacaagagtaaagaaaatacttcctttagaatatgcaaatatagcaataaaagatactaatgatatatatatttgtggattaaataactatggacaattaggtgttggaaatagatacgatagtagaaataatgataatagaatatttaattataagcatatgaattttgtaatgggtgatttgacatctattaaaaacagacataactttatacttctaaacaataagatagtgatacctaccacaaaagacatagattatggtttagtattaggaaatttatacaaaggagacctttatactgagcttccatatgaagatataaaagaagtatctatttctaagactcatattattatattacttaatgatggaacaatgtatggatgtggtacaaactaccatggagaattattgcaagacttgtctataaatcaagtggatgaatttgtgcagattaatgtatcagatgtaaagcatgtttcatgtggagataactttacttattttataaaatctgatgatagtctttggtctattggtaaaaattccgaatatcaattaggtataggtcacaataatccagttactgaattacaaagaattacaactatatctagctgtaaagaagtacattgtggtaaaaactatacattagtagtaactacaggtaatgaattatttgtacaaggatataatgataagggagctttaggattaggaagcgatagtgaaaatactataattaagttctttacaaaagcactaacagacataagagaaataaaatcttatggaagtgaccatatattagtacttaaaaatgataattcagtatgggttactggaaaaaatagggatgtatataaaattgaacaaccagtagaatttttaaaagaatttactatagtacctatttctgaagatgtaaatacagtaaaggatgtacttgcaacagacaatacattatatattatatcagaagtaggaacgacaaatgctgctatagaaattactgaaaaatcaatttcatcaattaagataaaaatacaagaccctaataaagatataagtagaatagaaatgcttataaatggtgaaagtgtaaaatctgtaagtgatttaactactgaaaaaatatcctttgaagtaccaccagataaaattaaaataggagagaataagatactatttagagcttattgtaaaggtgatgatttatatgcatctttatttatttttaaagagagtactggaaattctataattaaagattcttatgttatgataggtaatagaatgtacaaggtagttaatacaacatctaatgaacaagatattacaattacactagatagaggacttgaagaagatttaaatcttggagaccctatatatcaattaataaataaaactaaagttcaagtaaaaataaataaatctgacttattcaaagacatgaaactagttgaaatcaaaaaatcagactcaagttatcaagaaatctatgaattagaagaagccaacataaaaagtgctcagcctaaaatcatagtagaaaaaggagataaatggacagctataaaacgtccatctatgatttttagatatgatgctgaaaacaacgagccacaagcttaaaatggaggtgtaaaaattgtttaaattcgataaaaataaaatagaacaaatcaaacaaggtagaaaagtagaaatgcagtataaagacatttcagacataagtataggtcaagcaaagcaagatgatgatataacaaataattttatagcaaatgcagaaatatatgagatgttgttaagtcaaagttctgtcaatgaagcaagtaatataagcacttttagtgtaagaaaatctggaggtgagagtggaatggtagaagtatatgtagctttaattttaagaggcagaaaaacaatagaagaagtaccagcagtaattagagagcaagttagaattagatgtaaagaattagaaataccagttgaatagtaaatttagaataactatgtattagttattttttttatgtaaagtacaaggtcttaactttaataagtaagccttgtacttattttttgttatattagaaattgtatatatatttattatttattcaatctataaattaaacctacaatttaaagtacagaagattaaattgataatcctgaaaatataatattgcatgatgtaagaatataacaaaaattaaagctataagtataaaaaatttagacaataggaggctataatggataaattaataaccgaattgagtagtctgggggcaataggtatactatgtgctctattatttaaaaatactatgcaggagaaaaaagaagatagagacatgtataaaaaaactgtagaaaattttatagaattatctacacaacaacaagaaataaacaaaaatatacttgttcaaatgggaataatgaaaacagatgtagaggaaattaaggaagatgttactgatataaaaggtatgttacaaaacggtgtataacatgaaagtagcagtagcaccagattatatattattaggaaaagataaagtagtattgtagatagtgccctattttattgagaaggattttatattttaaaatattaattaaaaaaagtaataaaaataatatataaaaataacatataaaaattcaaaaaggagttaagcttaaatttgattagaaaaaatcaattttaagacaactccttttttttattaaattattgtctattaaccaaaatagctattttagcatctggattataacttatctgaaccatttgatttttcttaacatgttcaaggtcttcaccaccataagctatttgtaacttaactggtaacttaccttgttttataatagcaacgtactcttttttaccttttttctctaaactaatcaaattgccaacataaggtttaaagttctgatactttttactagaatttcttatgtagaagaaagcaccaacagcaataactaaatttatgccaagtgtaacccaagaattgattttaagcatagctccagcgattattatcacgaacattaaaacgataggtaatatagctttcttaagaagcaatttacccattatttcattagcctttttctcagggccactcatagtttttgatctagcaaatgattgcgcgaatttgtctcttaagcccattttatcctcctaattttaataaatatttagttataataacgagatattacttgaaactaaaaatttactacatttatattatgtttgacttttgtataaataattacattcaagtaaagcaaaatatactaattattttatcataaaattataaaaaagaaaataaatgaaataaaaatattagaacaaagaaatgatgtaaaatcgtatcaaaagcaacataaaaattatttatctattttctcatctttatttttgttatactcaatttttcctaaatccttctctttttcatattcatgaagttttaattcaatcataccttctattttggctttatcataatcatttaactttctaaagttgtttaaaagctttatttcattagagtttatgctattaagtggatagtttgaggaggaatcgcaaattaaatctgatttatgtgatagattatctccatttaatagccagtctactgaaacattaaatatctcagctatagattttaatatttcataatttggttttctaatgtttctctcaaatttacttaagttgtcacagcctaacatttcttctagttcatattgtttaaggttttttgcttttctcaaataaacaattctttctcctaaagtatccataaacactctccattcaattaatgtcaaaaagactttttaagatgtaaatagtttcaaattaaaggtcaaaatgacataaaaaccattgacttaaggtcaaaatgactttataattaacttaatgatacgaatttacatcctaattttagcacaaagtaatcaaaaaatcttatttagtattaaataaatttatatacttaatatgtgtacatattaaaaatatatactaaatagagggggtgcgtaagctaaagtaatataaaagtaaatataaatcacttagaaaggaagttgataaatggatgctcgaaaaaaatggataccttttttgggagtgcaagtcaagcaaagacttattgaattaaatatgactcaaagggaattagcgaagaaaataggtgttaatgaaaactatttgtcagctattttaaatggaagaagaacaggtaaaaaatataaatcatcaatttatcaattacttaatatagaatattcagaagatgattaataaatagtatataaagtaggtgaatattcttgtgtgcaaattggattcagatggggttatagagtgttgtagagcaattgatgattttattacagcacttagtaatataaaaagcttaaatatggaaagattaaatactttaactaaatattctagtacatgttcaatccttcttaaagaggggaattatgaaggatgtacaattgtgtatagaaagatgttggaagaattaaaaacatgagtaatgcatttcttaggaatataaattatacatagaaatgtattatatttttcaaagtacttaaactaaaatatggataagataatctaaatattataaatgtgcttgaaattagactatacttgtttttaaataatccaatatccatattttagtaatatactacaaaaaaagaaggttaatagatgatgtaaaatcgtatcaaattatgtatgtttaaaccattttatcttcattattattagaggaatgcttttttaagtctttatattcagatatcttaagttcaagtattccttctatttttattttatcacgttcgtttagttgtctgtatagatttaatatcatcatttcatcattagtaacatgtaagtaatcttctttatcttcttttacactactattgacatttaccttctctttaccatagagaagccagtcagtcgtaacattaaaataatcagctattgacattagtatatcacaattaggttttctatctcctgtttcatacttgcctaagttttcaaattttaaaatatccataagtttgcgctgagtaagttttttggagtttctcaaataagcaattctttttcctaaagtatccacaaaatacactcctttctttttatgagtaatgtctaaatgacatttgaaattaaaaatatataaatttataatataaaactactaaattaaagtctaaatgacattttgcttaaattaatatgctcataatatgattttaacatattatagttgaaaatatatggtttattttgatttgtatatataacaatagatttaattgttataaaaatgtaaaggggtgtatgaatagattgtataaatttatttcgataaactaagattgctttttgattgtctgtaaaagagaaaaagattaagataaaaatagtattatattgtaatttatattaatcaattacaaagattttatgaatttattctttagggtaaaatatttaagaataagataaatttacaatataatactataacactcttttatctagttttattttctttatagaacaataatattataaatgctagtagatttacacagaatactgttatatacatctgtttgaatcctgagtttagagtagattgtagtgtattttctatttttgttctattattttctatggaatttatataatccaattttgatttatcaaaagcctttggtatttcagtttttacctcttgtgtctttgctaaaactgcttggagtgattttttttgctgttgcattgtatcaaggcttttttccatgtctttcttttggtttatagaattatttaacttgctttgtagctctttcttttgagattccattgatcttagttttttacttaattcgttcttttgagttttatttttttgtaactttgtatttaagtcatctcttgtcttttttagttgctgtatttgagcatttaaactttctttttgttcatttacatttggtttattctcgctggaattgttattcttattttctgtagaatcattcttagtgtcgtctgattcagaattactggtattactctggttttgttcatttgagttattttcgttatcagtaggagtcttttctgtagtaggtattttattataagcagttgtaagttccttgatggcctcatcttgtttttcaagaccttgttccataccttttatacctttgtcaacaccagcaatacctttttttacaccatctattccttgattaataccagctctagcttttaccatattgtcaataccagtttgaactcctttaataccactatttagtttattttcaccatcttcaataccgtttattccactttgtgttccatctattcctttttgtacatttttctgtattttagtaattatagatggaactttttcatcaaacattgttgttgatatttcttttgttatattggtaatgttggttgtatctgctgactgaactttattaagtaaggattttggaagtttgccacctgtcatgtccatatttatatttgaagtatcattcatatttgggatagagacattttttaaattttttgccatttcagggtctgattttaagtcatctatcatgttttcaagttcttcaagttgaactattttaggagttgagggctttccaactaagtccataatattatcttgcacagataatcctgcatgtgctataaatccaatcattatagctggagaaattgaagtaccaattgagcgtatcaaggataatgttgcaagtgctgaattagattcttctaatcttgtatttgataacatcatatagtttagaggagttcccatagtaaagcccattcctaatcccataaatattaaacttacacatacactaaatacagtattggtttttagagcaattaaaactaggtaaagagagcctatcatagatacagaaaatcctagtaatagtattttctttgccccaaacttgtcaataagtcttccgcttaaaggagcagcaatacctgcaaataatcccaatatagctacaaaatatccaccagaaccagcatttatctttaatgcattttcagcatactgtggaacgaataccatacccatcattccaataccaacaattaaagataaaataagtactatcaatattctcggatttaaaaaatattcaaagcttaaaatagggtctttagctctattttcaataaatatgaaaataggtataagtacaataaatgtcaataagtatggataaactgatatatcttgtatagaatttttaaaattaaaaaagtctatattcataagaccatataatagtgatacgattatacatatcaacatcaatgtaccaagcttatctattttttctttagattcagacttattgtttttaatacagaaaactccaccaataagtatgattaaacaaattggaaggtttacaaaaaatagccacttccaattttgagttccaaagatacttagaattgtgctaccaatgcttgaacctaaaatattggcaataccatatgttgccccaactaaacctaaagccatgcctcttttattttctgggaaggtagttccaaattctgctgtagcaattggcatgattccaccaccaccaattgcttgaataacacgaccaattaataaaatatagaaattggaaaatagtgatgataatccacatattaatgaaccactaccaaatagaaatatactaactagatacacatattttcttcctattttatctgctaattttccagagataggaattacagaagcgtatgttaatgtgtatatggtaatcatccaaattcccgttttttcatttactccaaggctattttgtataatcgttcttgctggtgatactattccagtatcaatagctcccataaatatacctaatagataaagtgtaagtactaaaaatatttttggattactgtccttgttcttaatactagtattatgattcaaggtaaacaccaccttaatgtattaatttttcaatatagggttttaaatcttcaaattctatatgaagatatgttgaatatgaaaaaaacatttttattatgatattgcatactaatttgtcattattaaaaaaactttctttttctaaagcttcatatactttatttgaaagctgttcatgaaagtcgtctttgtgttttttcatttcaaaaaatctctctgtttcaaaagtgtttaaaaagtcattgtattggatattatgaactttgtttataaaatttcttatttcagtaaaaataatgtttagtttttttatgtaatcttcagtgtttttattggagtattcaattcgccttatcaataaatcccattcagattttgtgatatattctattatttcttgttttgaattaaagtaattatatactgtacctgcacttataccacacctttgagctattttccttatgctaatattcgagtaatcttcttctaaaatcatatcccgagatacttttaatatatcttcttttacattttctaaaatctttggcatattaccacctcttttattaaaattattatgaacactgtttattatactcctttaaaatttattaatcaatatgtaagctataatgtataatattattatatagatatgatagaaaataagtgtctttttataaatatctattatattaaatttgtacttaagtatgattatttattgaaatatgtgatattaaatttttctttttaataaattaaatattatatgataaggagaatatggtgatggaaaagaagtatgtaatggcattagaccaaggaacaaccagttcaagagctatactatttaataaaaaaggcgaaatagtgaaaattgcacaaaaagagttcaatcaaatttatccaaaagctggatgggtagagcatgaccctatggaaatatgggggtcacaaagtggtgtaatgagagaagttatagaaacagcaggtataagaccagaagaaattgcttcaatagggataactaatcaaagagagactacggttgtttggagtaggtatactggtaaacctatttataacgcaatagtatggcagtgtaggagaacatcagaaatatgtgatgaacttaaaaataaaggattggaagaatcaataaaagaaaaaacaggtcttttaatagatgcatacttttcagcaacaaaagtaaaatggatattagataatgtagaaggagctagggaaaaagcagaacaaggagagttattatttggaactatagatacatggttaatatggaatttaactcgtgggaaagtacatgtaacagattactcaaatgcatctagaacaatgatgtacaatataaatgatttagaatgggatgaggatatattacgagaattggacataccaataagcatgttgccattagtaaaaccttctagctatgtttatggtcatacagatgagcgcatgttatcaggagctaaaatacctattgcaggatgtgctggagaccaacaagcagcattatttggtcaaaattgtgttgaagaaggtactgcaaaaaatacttatggaacgggttgtttcttacttatgaatacaggcagtaacatagttaaatctaagcatgggttacttacaacaattgcttggggagttgatggaaaagtaacatatgcattagaaggaagtatatttattggaggagcatctgttcaatggcttagagatgaattaaagataattgaatctgcaaaagatagtgaaatgtatgcaaatagggtagaggatactaatggtgtatatgtagtgccagcatttacaggtcttggagctccatattgggatatgtatgctaggggttcaattttaggacttacaagaggagcaaaaaaagaacatatagtaagagccacattggaatcaattgcttatcagacaaaggatgttttagaagcaatgcaaaacgattcaaaattaaaactaaaatcattaaaagttgatggtggagcaagtaataataattttttaatgcaatttcaatcagatatattaaatgtagatatagatagacccaaaatagtagaaactacagctttaggagctgcttatttagcagggttgtctgttggattctatattggaagaaatgaaattacttcaaagtggtcagtagaaaaagagtttaatccaaatatgagtgaagagaagagatgtaaattatataaaggatggaaaaaagctgtatcgagagctttaagctgggaaaaagaagatgaattggatatttaaaaattaatcaaagttaaatttatttgaatttaaaaagagctttatgtaaaatatgaagctctttttttgttgttaattttgcatttttatataatcatactaaattatataatttatttttcgttttcatataaaaacattggtatagaattgtaaatgtgttggtcaccaactactaagagaatgtctccttctaaaaattcaatatatggtccaggagatattataagttcttcacctcttttaattgcaactattgtagcacctgtattttgccaaaatttagtttgtgcagctgtttgaccaatatatttgcaattagaatttatggtgaactgaacgggcactaaaggattgattatttcaagtctgttggaatagtctaaaattttatttatagtatctaatatttcattttctaaattagatttagtatctattaaattataaagtgttgatttatatgatgatatatttgtaatatctctatatttttttataaaagaagaagctttgtctggagatagtacaataacacctttaccctttatgcttttaacaacgccaatgtcctctaaaattttgacagctcttcttatcgtttctggagatacattgtatttaccagccaaaacagagcgtccaaatagtactgaatcctcttgtatttcacccgtgtatattttatttgcaatatccaacgctattttttggtatattggcatcgtatagtttttatccattgtttttcccccaatacaaaatttatgttaaaaaaatatataatcttaacaatactattgtataatttataggtttatatgtctacaatatgtacaaatattgtgcatgttttaaaataatattttaacatgcatttagtatacatgattttattatacttaaaactatataaagaattaattataaaaatataaagatattttacttacaaagaatgataattatatagatgaaagaaacaaataaatgaagaaaaatgattctgtcttgcatataaagtgattaaaaatgaaaaatactttaaaaatgaaggttaaggcccttattttaagtgaaaataattaattattaactaaaaaatggtaaaaagattttttgaaaaagaaatacaaatgaatgttcaattaaaataattgcaaaaatattccttaaatggtaaaattatattaattaaatgcaatagaatagttgcaaaaataaaattgaatacaagtgataaaatatttcatgcaatatataaaataaacaaaatttaaaaattaaaactacttattctatcaaaatgttagcaaggagggggtcataaattgtataaagtagatttaaatagtgatttaggagaaagttttggaacgtataagattggtttagatgaagaagttttaaaatatatttcatcagctaatatagcttgtgggtttcatgcaggtgaccctagtcatatggaaaaaacagtacagctagctaaaaaaaatggagtgaaaataggcgcacatccaggtttcctagatttaataggatttggaagacgtgagatgaaaataacaaagcaggaagctaaagattatacaaaatatcaattgggtgctttaatggcatttgcaagttcaaatggatgtaatatacaacatgtaaaaccacatggagcattatacaatatggcagctaaagataaagagttagctatggggatttgtgaagctatatatgaagtcgataaagatattatactgttggggctatataatagtgaaatgataaattctgctaaagaaattggacttaggtttgcaaatgaagtatttgcagatagagcttatgataataatggttttttggttccaagaagtgtagaaggagcagttatacatgatacaaaacatgcaatagatagggttgttaggatggtaaaagaaggaactgtagaaactttaacaggtgaagttatacatatcaaagcagattctatatgtgtacatggggacaatccaaaagcaatagagtttgtcaaagaaataagaaagcgttttgaattagaaggtatagaagtttgtccattagaaaacatagaagtttgttcgtcagagaacatagtataagactgataacatgagggggagataaaatatgagtacaaaaaatattacagataaaactaaaaataaaaaagatgtcggagcacttataggggctgcatttataatggcaacatcagcaattggaccagggtttttaactcagactgcacaatttacccaagattttggaccaaatttttcatttgtaattttaattacaacaatcctttttataggggctcaagtaaatgtatggagagtaattggtgtatcaggacttagaggtcaggatatagcaaataaaataataccgggattaggttatttagtagcttttttagtagctcttggaggattagcttttaatataggaaatgttggtggagctgcacttggtatgaatgtaatgtttaatatgaatatgacattaggaactgtattaagtggattaatagctatatttgtatttatgtcaaaaaattcaaattctctagtcgataagataactaaatttttagcattaggaatgataattatagttggatatgtagcaatatcaaatcatcctcctgttggagaggcagtatcaagaatggtaaaaccagaaaatccaaaaggattgatattcccaataataactctacttggaggaagtgttggaggttatataacttttgctggaggacatagattaatagacggtggaataacaggagaagaaaatataaaagaaataactaaatcttctcttttgggtatattagttgccacaatgatgagagttcttttatttttagcaatactggcagtggtttcaaaaggtcttcaacttgacccagaaaatccagctgcttcagcttttaaatttagtgcaggagcaataggatataaattctttggacttgtattatggtctgctgcaattacatcagttataggagctgcttatacatcagtttctttcttaaagacactaaatccttttatagataaatatgaaaaatattttataatagcatttatagcaatatcaacacttataatggcatttataggaaaaccagctactttattaattttagcaggagctttaaatggattgatacttccaatcacattaggaattatgcttatagcatctaaaagaaaagatattgttggagattacaagcatcctacatggcttttaatatttggattaatagtagttttaatatctgcatatacaggaataacttctcttagcagcctaggtgctttatttgcttaatttagaagaggtgacatttatggaaactagatacttgatatcaggggataaggcagtggttgctgaatttggaaatgagatatcagaagatataaacaaaaaagtaatttcatttatgagagcaatagaaatatcgaatcttaaaggtattgtaacagaaatggtaccaacatataggtcacttatgataagttataatccattagaaatagattttgatagtttgattgagaatttaaaaaaaatagaagataatttggaaagtatagtattaccaaaacctaaaatacatgagattccagtatgttatgatgaggtttttggtatagatattaaaaacgttgcaagctacaataatctcactgtagatgaagttataaaaatacacacaagcagagagtacttgatatatatgctagggtttactcctggatttccatatctaggtggtatggatgaaagaatagctacacctagattagaagtgccaaggactaaaatttatggtgggagtgttggaatagcaggttcccagactggtgtatatcctattgatagtcctggtggatggcaaataattggtaggacacctttaaaattatatgatgaaaatagagaagaacagattttgcttagagctggagactttataaaatttgttccaataacattagatgaatttatagaaatcgaaaaaaataacttaagtatttaaatatcgttatagtacagggagtggtatatatgggattcaaagttgaattaggaggtttccaaacattaatacaagacagaggtagagttggctatggtcaatatggtgtatctggatgtggagcaatggatgagtatgcacatagagtaggaaatatattagtaggaaattctgaagatgaggcttctttagaagttttaatgttaggtcctacaattacctttgatgaatatacgcaaatagcagtaactgggggagatttaggggctaaaataaatggaaaagaaattcaaaactggaggtcatatcaaataaatccaggtgatgtattatcatttagaggtgtgaaatcaggtgctagagcctatgtgtcaatagctggtggaatagatgttccacttgcaatgggaagtaagtcaacttatacaagatctaaaattggcggatttgaaggtagagcacttaaaaaaggagattatataaatacttttattcaggaaaaagattttacaataaataaaaaattaaattcaaaatatattccaacttatagttcagaaatcgtactaagaattgtaaaaggtcctcaatttgatgctttttctaacggtgaagtagagaaatttttatcaaataaatacaaagttacgaatgaaatagatagaatgggttgtagactagatggagagagtataaagcaccttaatggagcagatattatatctgatggtatttcttatggagctatacaagtacctggtcatggaaaaccgattataatgttatcagatagacagactagtggtggctatactaagatagggaacgttataagtgtagatttgtataagttagcacaagcaaagccaaatgatgtagtaaaatttgaacttgtagatatatatgaagcacatagactattgagagagcaagaagataagattcaagatatctacaagagtatgaaaaatataagagttgtaaaggcaaaagtattaaatgatatagcagtttaatttaattttaacaaatacaatttttattataatttataatataacttacaaatagctatttactatttaccataattaagatggtttagattagtcaaatagctatttttttagtttgagtaaatattttaaatttaaataaatacttcaattttaaaataaaagcaatatttaaatttattatattatctacaaaaagtaggtgtgttatgttgagtttatttagattttattggccaaattggaggtgatataactccatatccacgagctattgtatctttacttggattgatgattttatgtggtacattagcttttataaatgttgagtcacctggatttaatctaactaccttttcacccatacaaatatcaaccacaccactcgttaccaccataatttcttctgatgcatgatagatataatctttagcatcctcactttctggtttaagttcaaactctacaaataaaattgaaggtgtaaattcagttgtaggcattggagatactatctcgtaaaacatttcactctttggaaatttcatcataactctatcttcttttctaattactaaatcatcagtattattgtcatccataaacatatataaaggagtgtctaaaacttcagcgatttttctcaatgaagacaaggatggttcaatagcatctctttctatttgagagatataacttatagataaatctgtcaatttggaaacatcacttaatgtttttttcttgctttttcttatatttctcatcttttcacctagcataagaacctccaaataataaaattaatataaaatattcgcttaaaacaaagtaattatagcacaacatagaagtagtggcaataagaatacatagtagattttgacaattaaaatttaattaaatccaaataaaagtctatgaaaatgaattattgttaaattaatataaagaaaataataataaaaaaatttaatagaagagtattaattgaattaagattatcacattatattttggaaaagagtaaattttcagtaaattatcttgacatatatattgaagtaataatataatttaaagtataaaattttaaaaattgaattataacttcaaaaaataaggagggtaatatgaagataacagatatcaaatttgaaaagcttagaattaaattaaaaaaacctgtagtagtttcatttggagtaattgaatatggagaaagtgtaattttaaaaattgaaactgatgaagggtattgtggatttggcgaagcagcacctcttgcagcagttacaggtgaagttttggataatgttctttcagtattgcttatgtttaaaaaagagttaataggcaaagacccactagatattgaaaccatacatacaatcatggatggaattattataggtaatacttctgcaaaagcagctattgacatagctttatatgatattaaaggaaaaattatgaatgcacctctttataaagttcttggaggatttgatagtaaagtccaaacggatattactataagtatagataagccagaaaaaatggcagtagaagctttagaaagagtaaaagaaggttttaggatattgaagcttaaagcaggtataaatcctgaagacgatattgaagctgtaaaattaattagagaagccgttggagagagtataagaattagaattgatgcaaatcaaggatggaacgtaaatagcagtataaatactatcaaaaaattagaagaatttaatgttgatgcaattgaacaagcacttccacattgggatttagatggtactgcttacataagaaataaaagtaatacaaaaattatgatagatgaatcgttacattcaccaatagatgcaattaaggctataaaaaagaatgcagttgatacatttaatattaagctgatgaaatcaagtggaatatatcctgctataaaaatcaacaacatagctgaggcaagtggagtaaattgtatgttaggatgtatgctggaaacgagaattggtataacagcagcagcaaatttaatagcatctaaaaagaacataacagaagctgaccttgatagttttatgttttgtgaagaatcaaaagatatatctggaggatttgtaatggatggagatattatgaatcttgtcaataaaccaggtttaggaatagaagtaaacttatgataaatttggaggttaaatatgaatacacttttttcaaatccaggtagtatacttgctgtaatgacatcaatgattgcattgggtttttacttacaaagatacaaagccattaaaagcttaggaccagcacttacaataatcataatgggaataatactttcaaacttaaaagtagttccagtaagtactgagttatatggaactatttcaacatatgctatcccagtttctatgactataatgttgatgagtgttgacttaaaagaaatgacaaaattatcaagagaacctttaattgcaatttttgtagctgtattaactgtaagtatcatggcatttttatttggattagtatttgcagaaaaaatatcagaaggttggaaggttgctggaatgtttgtaggtacatacactggtggaagtgctaatcttacagctattggaacaggccttaatgtaagtagacaaactcttgctgcagcaaatgcagcagactatgtaattggagtaccaacattgatatttatgtttgctctaccagcaatattaaaaaattcaaagaagtttaaaaaactttggccatatcatgtagaagaaacagaattagaagattgtcaaaatgaagaatttatggagtcaaaagaatggagtattaaagatatagcttggatgttggctataggttttgttgttacagaagtttcaacaatacttgctggatatttcaattcaagttttagtagtgcagcaagaatacttttagttacaacaatttcaattataattgctcaattaaagccagtaaagaaactaaagggaaatttagatttaggattatttgttgcattattctttttatgtacaataggtttttcagtagatataaaagagtttttaggttcaacttttactataacactttactgttttagcataatttttgcttcatttgtttttcatttaggcataactagacttttaaagataaagtatcaatatgtaatactttctatagtaggagcaattgctgatggtcctacttcagctttagtagctgcttctgcaaagtggaattcgcttgtaagtgtagcagtcgtaatgggagtaattggtggagtattaggaaattatgcaggtatatcagtggcatatgcaataaagatgtctctaggattataggggggagtttaattgataaaatttaaattatacatatctggactatacagtggaaatgtaatctttgatggcgatttattaattgaaaagttgaatccttttacaaataaaatagaaagtttaaaaccaataagcaaagaagaaaatacatactatttaaatcttacaaaaatagatttaaagtctttatttaataactttgatgtatatactaaaagcttagtaaacacagataaagacacagttataaataacttaggagaaacgcattctaaacttaatgaatatatatgggttcaaagaaacaaaaagttcccactagatataattattgtagataataaaatagtaggttttatctgtttatccagagaaacttgtactatattaattatggatggatatgaagagtatactgtattaaaagaatgggaaaaaacccataaaaatgaagagatatattctataagatttggtggaaattatatgattgatatgaaagatggtataaaactttctacagatgtatatctccctgattttgtagattctaccaaaaaagcaccaacaattcttatgagaactccatatggaaaagaaaatgataaagaaatatattataaatatgtacaaagaggatatgctgttgtaatacaagatgttaggggaagaaatgaatcagaaggtaagtgggaacctatgattcatgagagggaagatggagatagtaccataaattggatagtatcacaggaatggtcaagtggaatagttggaatgcttggagcatcatatcttggttatgtccaatgggcagctgcatcttcaggcaataagcatcttaaagctttagttagtatagtaacatcaggaagcccttttattgatataccaagaaaaggaggagcttttgtatctggtatgcttgcatgggcatttatggtatcaagaaataaagttgatagaagtaaaatggtaagagatgattgggatgatgttttaaacatacgaccaatagaaaatatacctgttgaagctcttggatatagaattgaatttctggaagaatggttaaagagagtagaaaaagatgagtattgggatttgatggattggcatttacaaaaagataaaataaatgtacctgcattggttgtatctgggtggtatgatgataatagtatgggaactacagaggccttagatgttataaaggactatgaaaaaggaaagagaaaggctattctaggtccatggatgcataattcaaatactttaagagatataaatggtatttctttaggaaatagttcattaagatatgatttggattataattatctattatggtttgataaatacttaaaaggtatagaaaataacatagatacgactgctccagtagagtattactctgtaggttttaataagtggaagacagaagaaaattggccaataataaataagatagataaaagtatgtatctaataagtgatggaaatgctaacacatctttaggaaatggtagattagtatttgataatgatttagaagaaaagtatgatagttatatatataatccaaaagacccatcagtacaactaattgatatgtcagagaatgaagttggagttccaaataactacaaagatttagaaaaaagaagtgatatgttgtgttatacatcagatgcttttagtgaagaatttactgtaacaggtgatataaagttagagttttttgcatcaagttctgccaaagatactgactgggttataaaaattatggacgtggatttagatggaaattcaattaaattagctgatggtatacttagtgctagatttagaaatagtttttataagtcagagtttatggaagaaggagagatttataagtttacgattataacttcaaaaatatcaaacacgtttaaagttggtcataaaattagactagatataacgtctagtgctaaaaactttattttccaaaatagcaacacgaaagagggatataatagtattgaatatatagaagcaaagaatacgatttaccatggaggtaaatatccatctaaattgatattgccaatagaaaataagtaaatttatatagattaaatagtgaggaggtgtctcaaaatgaattttttagttcgtgagacactttcttttatacgaaatcaaatatattttcatcatttcaacaatgaaaaagaggcttatctctctgttttgagatagcctcctataagctaaattgattattttgtagctgcaacaacgctcatttcaactaacaaatgctctctagcaagtctagcttcaacacaagctctagcaggttcaaatcctttttcaacccaagcatcccaaacagagttcatagcttcaaagtctttcatatctcttaaataaatagtaacagatagcaaatgttgcttatctgaaccatatttgtttaataaatcttctattttagctaaaacttcagttgtttgttcaattactcctccttcagcatgagtttgtccacataaataaactgtattgttatgaactacagctctactcattcttccagttccttcatatctctttatttccatattttaaatacctccatagttaagaaatctattaaaaatctaaataataaattaaaaaaagtctatactatataaaattatattatatattctgataataatccataaaaacatataactttttagctataattattattgttattaattgaaaagacttattagttacttgacatagtttacacttttaattatagtataaattggaatatttagataattattatttaatgtataagctaagtttttaattaatatggctttatacatttatatagaaaagaggtacgtatgagtagcacaatcaaatcaaatcgaataaaaggtataatgtttataatagcatcagcgcttggctttgcaatgatgtctgcattcgtaaagctagctggagatttaccaagttttcaaaaagtgttctttagaaatctggtatcagctataatagctttttggcttatcataaaacataaaggaagtctaactggtaaaaaagaaaatttaaaagtacttttatataggtcaatatttggaactctaggagttatatttaactactatgcaattgacaagttgatgctttcagatgctaatatgctaaataaaatgagtcccttccttgtagtaatattttgtgcaattgctctaaaagaaaaaataaatgtaaagcagataggagctattataattgcatttataggagctttattcataataaaaccaacatttagtgtagaagtaattccatatcttgggggaattgcaggagctgtatttgcagcaatggcatatacttgtttaagagttcttggagatagagaagattactatacaattgtatttttcttttcagttttttcattagttactgtagggccaattgcttttgcagtatatgaaccaatgacccttatgcaacttatatatctattactaggtggagtatttgcaagtctaggtcaatttggaataactttagcatataaatatgcacctgctaaggaaatctctatatttgactatagtaatataatcttttcagcaattttaagtatattcttattcaatgtctatccagatatgttaagtgttgttggatatttaatagtattttcggcagcattttatatgtttttatacaataagaagttagataaattagacaaagaaaagaagaagtaaactagataaaagtgtttttataatttgtattgaatatttaagtctttgtattaaaattaaagaaaatttaattaaaaatgtttggtatattaacttataacagcagttaaaattgaaaaattataactgctgtttcttttattaaaaatatccaaatgtctgtaaaaatagactataatagagtagtataaataatataaaggggataaattaaagtatggaaaaagtgaaagttgctgtgattggagcaggtaatagaggaacgtatgcatatgctccatatatttatgaaaattctgatatatgtgaaatagttgctgtagcagaacctaaaaaaggaagacgagaactatttacacaaaaatataacctagatagtaaaaatgtatttgaaactttagaagacttttttaaacatgacaagatggcagatgcagtaataatagctacaaatgatgatagacattatgatgtagcaaaactagctcttgaaaaaggttatcatgtactattagaaaagccaatgtctaatagtttagatggtttggtacatatagatgacttgtgtgataagtataaagataagatttttatgatttgccatgtactgagatattctccattttataataaattaaaagaaattgtagaaagcaaaaaattaggagagctagttagtatacaatataatgaaaatataggatattggcattttgcacatagctttactagagggaattggagaaatagcaatgaaaccagccctttaattttagcaaagagttgtcatgacatggatattttgttatatttagtaggaagtagatgcaaaaaaatatctgcatttggaagcttaaagcatcttaataaccaaaatgctagtggagagatggcacaaaattgtcttcagtgtttagttgaaaaaaaatgtccatattcagcaaagagaatttatttagaaaaagatagaagtataaatagagctgttcacataaatccaactgaagagaatctattaaatatacttaagacaagtccatatggaagatgtgtttacagatgtgataataatgttgtagacaatatggtaaatatattacagtttgaaaatggagtgacggctacttttaatttatgtgcatttactaaagaaaatggaagaactataaagttaatgtttagtcatggtgaagttggtggggatttaaataaaaatgagataagaattaaaaaatttggaaaaaacgaagaaatagttatgaatccatcaaatcaacagaatatggtagaggaatatgatagaaatcttatagctgaatttattaaattagtttcaaataaagaactagaaaagggtagagtagcagcaaaagaagctatacaaagtcatgtaatggcatttgcagcagaatattctagggtcagtgatgaagtagtgtatatagaagaattttttgatagtgctaagcaaatgactaaggagatagaagaaactatattttaattaataaaaatttattaaataaaataaagatagattaaataatagaaatacgaaaatatgtgttctattaaggaatctatcttttttattaaggttttttcttatccctatcaaaaaaatccatacattctgataaaagataagaaagtaaagcgaataagatttctgtacttaaaggaatcgttactgaatccataaaggtatcaattatgttcatagctagaaaagttagtataaaatcaattataaattcgcaaagtttatatattgagtatggtaatttgtttacatatctgaatatatctaaaatagtagtgcatagaaaatcaattggagtggttatacaaaaatatattaaaaagaaaattaatacagctccaagagatttatattcaaatcctaagaatgataagaagccaattcctataaccgtgaaaatacaaaaagttataccaaaaaaaacagcaaaaaataaaaatacagaaataaattcgcctaaaggaatccttcttttattacttatcttaatcaactccttaatttatgatatgaaatttatataaataataacattcttaaaaattcataatagtcctctgtttcaaatagtactgtttgagaatctatttttttcatatttggataaaaagaggccttaaaagctttataatgttctctaaattttatttctatcttaaatttatctggcaattttattaagtgcctagataaatctccagataaagcttttttgacacctttttcaattttttttagtgcaaggtttggatggattgaaattgaaccatttccaattccttttgacacaggaacagtgactatatttggatttagtttttttgcactctcacaaagcatttcatctccacttaaaaatgctacaggaacattataatatgcagcaatataagcatttatagtaaattcagatgctatttcatcatttattttaaaatagtcataatcaatatccatagtatgagaaagtggattaccattacaagtagctccagagtgatagccggtgaatatacatgcatcaaagctttcatcaattccagccatcataactagtgggtctttggtccatcctctaagtattttgacgttttcaggtaaaatatttggattaatatttctaccactgtcatgtgcatctttaacaagtatttcatgtacaccagattgagtagctccatcacatgctgctgttatctctttactcatttgtgttctatagtgttgtgaaaattcacattcaagttttgtttcatcccaatttacaataccacaagtaccttctatatcagcacttaaatacaatttcataatatatacccccttatgtttattattgatgataataacagataacagaaaatacataatcaataaagggcataaaaatattatgtcttactattaattattattaaatctgtaactgaaaaataactaaattggtattaaaaaatataacactatgtgtcatttatttatatagttttttatatctgatgtttatataaaattgtaacatataagtggttacatttactagtttaacatagttaaaatagttaggtattatttttaagttaaattgattattataaaatcgtagaataaaagaaaaatttaatttattaaaatgcatgaaatgttttttcctcaacataatgctaaattaaactcaaaaagaaataatagaaaaatcttatgtagcttagaaagaatgtgaatgatttaagggaaaaatagaaatttattatataatattaggctgtattatgtaatacagcctaatattatatgtatatgtgacataaaatcttggtaagtgtaaataaaataaatgtggaaaacaaattaatgaaatcaagaaaaaagtaatttaaaattcaatttcatcttcccaattaaattctcctgatttttctacactcttaggccagtgactacaccatttaggaacggacggattttcaaccctatcaacgcttggagtatatggctttaagtctataacaggactattatcattagcatcaatatatggtatttttattataccattttcatggtcgatattgataatttgtacagcagtcaatgctattggattgggtcttataggtgaccttgttgcaaatattcctataacgtttggtccacttttataaggttttggggtttctaaaatacttcttagttcaggattatcaaacccatcagcccaccaaaatacatttaaatgactgaaatcgtcgagttcatttaatgcaggtacatactttttgtctaatttaataaagacctcttcgccttgaatacatattttacctataggatttattaatatttctttcataatattacctccaactatttaatttatcatttgtaattttagggtataacatgacatcatgtgagggtcaatataaaataataaataaaaatattaatagttagaatgataatacattttttacatggagcatgacaccagtaataaggcaatcttcgtcaatatcaaaagtagaggtatgcaaaggggaagtaatgtttttttcacgatttgcacaaccaaggtggtaaaaagctccttcacagtgtcttagaaaatacgaaaagtcttcagccccaagagtgggcgagtctttaaggataatattttcttctccaaacaattctacagcattttgcttgacgtaatctactagatggtttgaattgataagagctggataaccttcctcaatttcaacagaaatacttcctccaaatgttttacaagtaaaatcgcaaatttctctaattcgtttttttgaaaactctctagtttcaggagtcaaggttctcaaagtaccccttataaccactttgtcacaaactatattttccttgattccaccttcaatctttcctagagaaataaccacagaatcagttggatttgtgtttcgactaacgattgtctgtagagctgtaataatatgagcagatataacaatagcatcaataccttgatgtggataagctccatgacattttgaaccatgtacagttaattgaagtgtatcggtggaagcatttagagtgttgtattttaattcaattagatttttgttgatattgggatttacatggagtccaaatatatattttacatttgggttttcaagacatccatcttctatcataagttgagccccaccaatagtttcctcggcaggttgaaaaaagaattttacatttacatttaagtaattctttaatttaaatagtatattacaagtacccagtaaaatagcagtgtgtgcatcatgaccacatgcatgcattttaccaatattaatagatttataagaataattaagttcttctgttataggtaaggcatctatatcagctcttatagcaactgtttcaaagtttggactcacgttaatgtatgcagttatccctgtatgattcttatattcaatataatttatacctatttcatttaagtatttaataatttttttcttagtttgaaattcttctaatccaagttctggagtcttatgtaaatctcttcttatatttataatccaatcatttatctcatgacaaagagttcttatattaagcataaaacacatcctaactatattaaaaatttatttttcttcattaattatattattttatgtaaatcattattatgtatcaagtacaaataaaatatcttataattatattagagatatttagtatggagaagaatatatcattttataagaagaggtgtttaaatgttaggaataattgcgccatctgggccattaagaaatacaagtttggaggaaataaagtttaatttagaaagttatggttacgaagttaagttttctgaaagttgtagtttaaattataaaggttatttagctggtaatgatgatattagagcaagggatatagaagatatgtttttagataaagatgtagatataattatgtgcttaagaggaggttatggaacaacaagaatattggataaaataaattatgatataataaagcaaaatccaaaaccatttataggtttttctgatataacaggtttaaatttagctttttataaaaattgtggacttttaccatatcatggaataatggcagcaaatgtaggtaaatgggataaatttacctataaatcattggtaaatgctttagaatttaaagatgacttatatttagaaaatccaaaagaagaaaagatttatactgtatgtgaaggtaaagcagagggaataataatgggaggaaatttatccttaataattgccacaatgggaacaaaatatgaaatagatgcaaaagataaaattttgtttattgaggaaattggagaacctcaatataaactggatagaatgttaacacaactatattcttcaggaaaacttgaggaatgtaatggtataatttttggagattttaaggattgtattgaagaaaatgatttgatggaattactaatagaatttgcaaataaggtcaataaaccttctatatataatcttcagtcaggacattgtatcccaatgataactattcctttgggcagaatgtgcgaattagatgctacagaaaaaatcgttaaattaaaaaaatagtgtgtatataaatataatagaaatatggtataatcttatacaagtaaaaatttagctaggaggatgaaaaatgtctgatgatagaataatagactttaacgaactaaagaacaaagttaaagattctgatgtagataaatttgagcaatacatatataacttatatttttctgttatggatggaaagatgtccatggctgagttttcaagaaaaatattcgattatatgagagataacaacatatctcaagaaaaatttatgaaaatacaaaagcaatttatggagagatatggtatggacactgaagaagtagaaaaacaacttagaaactttggaatcgacccttctacagcaggttttatgagtaataatacttccagcaaagtatctacagaagatttagagtcatttaagaagagtgcaggattttatgagaaatatggagaaaaaatccaaccaaagagttgtataacaacatttataaaaaatgacttaaatgatattaatgtaataatcgaccaagaaaagataatgctttgtagtgatagaaaaataaatcttatggattcagaactaaatgagtttttattagaatataagaatatgtttaataaaaaaataaaggtagtaatgtgcgaaactacgaataagtatgattattaaaaaatgaatttaaatactgaagtagtatcaattaattgtactacttaaaaataaaaatcgcaatttattattccttataaatttgtataaggaatatctaaactgcgattttttatattgtgaagattagtcataatagatagtgttttaaattgtaatcttctcactaaaactgtgtttttctattagaaattttattaaaaataaatatctgataattgtattatatgggatgtaaagtattagaggcttaacgaatctcttttaatacattaactccattttgaatcatactgttgaaaaatactaagtttaaaatctcagcagggtgaatgttaggaatatcataagtatctactaaattcataggtacaactatatttttttcaatattatgttgattaaaatatgattttagagttattgcaaattgatatatgcatatatctgtgcaatcgccaactataattatattatctatattatcaaaatccaaattttctaatgcaaaaaatccattagtagaatttttaggaagaatttgtaggttttctatcgacttaagttcatcaaccaattcactttctacatcattttccaaacagtgaacaggataactcaaaagttctattgatttaggagtatgagaatcagtaaatgctattactctatttaatttgtttgatattttttttgtaaacatttcaattggttttattaaagactctactctaggagagtataatgcaccttgtcttgcaaagccattattaacatcaattataaataaagcagttttactcaaatcataattttctattttttctattggtagattatctaaattactctttaaagcttcaagttcatttaataagttatccatagttatacctccaagataaatttaataaaattgtacatattaattatataaaagtcaaggagtacaaactattgtataattagctgtattgttttgagtgtaaaagatttgaagcaatatctggatagttagtaaaaataccatctacattgagttttagacagtgtagtatatcatcctcttcatttacagtatatacattgacaccaagtagatttttgtgacaaagttcaattagagattcatttactaaaactagaggtggatgaaggtaactattacccagaaatttagcaaaattgactacattgtttataggtaaataacacaataatcctgtttttacactagggtctaatttatgaaagttttttaagctattgctgttgaaactagatataagaactctatttttcatattatactttaaaataagctctaaaacgtctttttctatattgggatagtttattttgtcagtttttagttctatatttaaaataaggtctgtaggtgaaattagaattaatacttcttctaaagttggaattttacattctttattgttttgatatccttcaaaagatgagtttagagtttttaattttcttaaagtaaagtcttttacaaaaccatgtccattaaaagttctatcaaccttttcatcatgaataactacaatttttccatccttagttctgtggacatcaagttctattccatatatatccatatacaaacattttttaaaagctagaatagtattttctggatactttccactaaaccccctatgagcataaatattcatttatatggttccctcctataagtataacttatcttataaaaatttaattaatataatatatcatattccaaaaggtattgttatatattagttaaataactatttgtaatttatatattatataaatgtagaaaaataaaatcatatatgtgttataatatattttaaacattgtaaatattacgaatttagtagtcataataagtgtaattttatgcaagctcatgtttttagagcttgcatatgtattattaatatatttatatattgtgaaaataaaattccaaaagaattttttctatagacttagtagtaagggggaattttgatatgtatgaagttaatttagaacgagctatgaattattggatggatttgttagatgattatacgaatatagcaaaaattccaaatgattttttttataaagattgttctgatgaagtagtagatgaggtttttaagatgaatattgagaaacatgaaaggttaattcaatattctaaagtgaacaatattagcatagactctatcatagaaactatatatggccttatacttcaaaagtatatatatgaagatgatgtagtttttggtaaaacaatgaatataattccaataagagtaagagttagacaaagtgaaaaatttatagatgttgtaaggaagctaaaaaggcagtggagcaggtctttagagtatggatactatttgttatcagatatagagaataaaaatcatctaaatactaagcttataaacacaatatttatagctaaaagttttgatttatcatatgattatgacatagaaaaaaaaggatatgatttatctgtaatagtatatactaagagggcacttaaaataaaaataaagtataaaccatctatatataaaagagaaactattagaagaattttaaatcaatttgattatataatagagcaaataatagaagataatgatattttaatagaagatttagaatttgtatgtaaggaagaagaaaaagtattattggaagactttaataataatcaatatgaagtaccctatgataaaagttatgttgatttatttagggagcaagttaaggtaacacctagtaatatagctgctagggatgaaaatagaaagttaacatataaagaattggatgaggtaactgataaacttgcaggttatttaaatcatataggagtggaaagtgaagacatagtagctgtaatgttaccaagagatattaacataattattacagcaatagggattatgaaatcagggggagcattttttccaatagacacgagtaatccagaagaaagattgaattaccttcttgaagatagtaatgcaaaagtagtgataactacagatgaactcaaaagtaaggttgtaaatgagaataccatagtactcgatataaatgatgaagaaatgtttaagcttggatatgaattaactgaaaaaataacatcatcaaattgtgcatatacgatatctacttcagggtcaactggtaggccaaagaccatagctatagaacataagagtttagtaaatatgtgttattatagcgtaaaatctataagcgctacagaaaatgatatatgtggtatatacttaagtttcagttttgatgctgtaatgaaacaactattcccttatttgcttgtaggtgcatcaatagatattatgcctgaagaagctaaatttgatgaatatacagtaaatgaatactgtgaggaaaatgacataactatactagcattgccaacagcatttgcaaggttatttatacaaaattgcaataataattcacttagagttgtacagactggaggagaaagattaaaaggatatagaaagcgtaattatgaactatataatgagtatggaccaaccgaatttactgttgtatcgacttcttttcatgtggacagagaatatggaaaaataccaataggaaaacctatatttaatacttatgcatatgtattagataaaaagaacaaactatgtccaattggagcaccaggagagctatgtctatcaggcattcaaatatcaagaggatatttaaataaaaaagggctaacagagcaagtatttgtagagaatccttacaaaacttgtgaatataataagttaatgtatagaactggtgatttagtaagatggttagatgatggaaatttagattatattggaaggatggacaatcaagtaaaaattgatgagtttaggatagagctatatgagattgaaaatataataaataatattacagaaattaaaagtgttgtttgtatatcgagaacaaatgatgacggggatatgtatatatgtgcatattatgtaattgatgaggaagatagtggtaagataaatgaaagaaccattagagaatatttaaatgagcatctacctccatatatgattccaacaataataatgaggatagataaaataccagttacaccaataggaaaagtaaataaaaaagcactaccagagtgattttttattatgacaggtgttgtaaagtgattccatacatttctttatgacacctatttttctgaggaaatcaattgatgtaaaaaaaagaattttctgtatatatttactatggtgaaaatttatttataagaatgattattgtattttttatacttttccgtgttttaaagcattttttttacaaaattaattttacattaaaaattttttttattttatatcttaatagtttttagtagaattgaaaaataaaaagaaaattagcataaaaatatctaaaagtagaaattaataatatagggttaaattttagtagttttgactcgctatttgtaaaataataaaaagttaagttttatatgtatatatgttataatatatacaaattgaaaaggggtgaaaattttatgaacaaaaaattacctaagggtgcttatggtgaggttagtggaaaagattacgttccatatatcacagataagtccagaaccggtggaaatgtagctgtactgattatcggtattattttagctgccatttttgccgcatctacaacttactctggaatgaaagccggtcttacagttgctgcaggtattccaggagctataataggttctgcttttgttggagcatttgctcgttcaaagggtattcttggtaaaaacttaatccaagggatgtcaagtggtggagaatctgttgcaagtggatttattttcgtattaccagcagttatattaattggaagccaaattacattctttgaaggcctagctgttggagttggtggagttttatttggtataggaattgctgctatagttcacaactatctaatagttgaagaacatggtaaacttatgtatccagaatcaatggctatatctgagacacttgttgcttcagaggctggtggagattcaattaagtacatgggaattggatttgtaataagtggatttattactgtattaactggttcattcttaaatgtagcaaacaatgtaatgagtcttgtaggaagcaaattctacaaatggaaatttgatattgaagtaaatcctctacttttaggaattggatttatagtagggcttgaagtttctttaacaatgtttgcaggaagtattttatcaaactttggtatagcacctttaataggatactttacagatatggctaaagatggagctatggtatggaataatcctgcaatgcctcttaaccaaatggatgtcggagcaatatctagtagttatgtaaaatatataggtgctggtatgatgctttgtggaggtattattggtgcaataaaacttataccaactataatcgcttctataaaagaaacacttaaagctaaatcaagtgctggagaaggagaagaaggttcatctatacaaatgatacttttattaggtggagtagttattggatttttagcagcattcttaatttctggtaacattgttatggcaattattggagctatcatatctcttttattatctttattatttgtcatagtagctggtcgtttaacaggaacaattggaacatcaaatcttccagtttctggtatgactatagcttctctagttattgtaacattagtgtttgttataatgggatggactgatttagaagctaataaatcattacttttatttggttcatttatagttgttgctattgctatagctggaggttatactcaatctcaaaaagtaacttatattattggtggtagcaaaaacgaaatgcaacgttactttacaattgcaagtatagttggtgttatagttgttgtaggagtaattttattactttctgaccaacttagagcaactggtgataatgtacaatttgcattaccacaagcaaacttaatgtcaacattaacttctggtattatgtcaggtagtttaccttgggttatgattattgttggagtatttatggcaatagttctatatgcattaaatttaccaataatgactatagctataggattctatttaccaattgcaacaacttctataatattagttggagcattaattcgtttatttgttgaattagtatctaaaactgaaaaagaaaaagaagttaaagtttctaatggtataagtttatcttctggtcttgttgctggtggttctatcattggtttaataggtataatattacaagtaactggagttgtaactccaaaggtaccaagtggatttgctgcaacaaattcaatggcaattgctttattagtagttttagttgtgcttacaacattacctattgttttatctaaagtaaaaaataatgagcaagagtaatgatgttttagatattgtatttaaaattactgatggacttgaatatgaagtagctgaaaatagtgttgttactatacttgaaaaacaggaccataaaattcaaaagttttttagaaagttaaaagctagaatacctaaatacaaaaaaatagaactagatgaatattccagttttgtttttttacaaattgatggtcaaaggactgttagagaaataggcaagaacctagaagctaaatatggagaagaatctcatccactttatgaaaggttgttagtatttttaaatcatattgaagttaattgtcactatattgaaagactggatatatagatataataagaattattatagatatattaaagcatataaattagaaggtaattatgaaagaggctgtctcaaaatagagataagcctcttttgtattgttgaaatgatgaaaacatatttgatttctcataaaaaagagtgtctcataaaactaaaaagttcattttgagacactacctttaaaatatttataaagtatagatttaaagcaaaacttattaaacttaagattattttaatatcacttattattagctatttcatcagctagattatttaaatattcccatctttcatatttgtattcaagttccttttctagtttagatttctcatctaaaatttcttgaagtttagtaaaatcagttgaaaattttgcagtactttcatcaagtgttgcaattttagattcgagtttttctatatcagagtcaatattttcaaactccctttgttcattatatgagaacttaagctttttatcatttttaggtttttctttttttagggtagtagagtcatcttttttaactgattcccttttagattcttcaaattcaattccttgaatctctctataaataagataatcactgtaattacctgtatagatatgaatttttccattaccttcatatgcaaatattttattacaaattctatctaagaaatatctatcatgtgatactgtaactactacacctttaaattcgtctaggtattcttctaatattttaagcgtttcaatatctaaatcatttgtaggttcatctaaaagaagcacattaggagctgtcataaggattttaagaagatgtagtcttcttctttcaccaccagataatttacctatcaaagtatattgcatagtaccattaaaaaggaatctttcacacatttgagaagctgtaatcctagtaccatctgaagtttctatatagtcactagcttcttttacatagtctatagccctcatatcaatattcatatgagagtcgtcttgagaaaaacaacctattttaactgtttctccaattgaaatatatccactatcaggctctatttctccattaagtatatttataagggtagatttacccataccatttttgcctattataccaattctatctgtacgagttaaagtgtattctaaattatctataacagtattttcttcaaatgatttagatatattgtgtatttctattattttatttccaagtctacttgatgcaacagatatatcgagattttcatcaggtttaaaagaatctctattcataagttcatcaaatctttgtaaacgagctttttgtttagtgctacgagcctgagctcctcgttttacccacgcaagctctgttcttattaaattttgtcttttatcttcaatacttgcttctagcgaaagtctttccattttcttttccaaaaatattgaataattcccatcataactgaataatctacccttgtccagttcaataattctatttgtaacacggtctaaaaagtatctatcatgagttatcataagcaatgagccttttcttgaattaagatattcctcaagccaatctatagtatcattgtctagatggtttgtaggctcatctagtatcaaaaactcacaaggtgtaataagggctgatgccagagagactctctttctttgcccaccagaaagttctgctattttttgattaaagtcatttataccaagctttgtaagtactgacttagcttcactttctaaatcccaaagatttaaggcatctattttttcgtgtactgataataattttttatttaattcctctgtaaagtttgaattaagtttttctaggatttcttgatattcaccaagtagctttaattcttcagaagttccattaaatacttgttcaagtacagttgaattttcattgtaagttggattttgaggtagatattctatcctaataccattagtttttgttatattaccagtctcactttcttcaactcctgcaataattttgagtaaggtagatttaccagtaccatttacaccaataagtcctattttttccccctcatttattccaagagatatattttctagtaattttttttcagaatagcttttacttatattttccaatgtcattaaattcatataattcacctttatttctaatctattatttttcaaaatgttgataatctgggtttttccaatagccaccccaactccaacctctgcttacaaaagcattataacaatcatcacctttttttatcattccaaattttgtgctagacctatcagcataaactgtacttattttaggtgtaacatcatttccagaaacttgaggattctgtaatgggtttatatctatagcacgtcctttaccatgatttgaaactacatttgtaccagctatagttctataacaaaatgatgaggtattattatcagacatagatttttcatctacagcatcatagtcatctattaatttaattttttcaattggatattttttttcgtataattccttaaaaatatccactacttctggagctagttcactgtttactatcatttctccttgatgagttttttcatcaaatccataatatgtaagttttaaataagatagactatcaaagcttataggttcatcagtaggcatagatttaccaatcattttattttttatattatctggtattgaagaatatgaaaaagtaggcttgatattattatcttcctgctttttggtagagctttgattatttttagaatcatctgttgtattatttttattctgcatagtttcttgactctttatattaccttttttgttgggattagagaacagtatctcatatatagataataaagcaagaaataatacagttattacaatcgttaattttaatttattaatttttcttcgttttgactttttactcatattatcccccagtattagattcatataaactatatatattatacctcataaaaataaactaggctaacaatatttagttaacctagaacatttcatttatagtttctccaattatttttattccaatttcaatgtcttcaaaagacaacctagaaaatccgagtcttaaagtatcaaaaccagagttatctgtaaaaaataaatctccaggcataaatataacatttttttcataacatttttctaataaaactctagtatctatattttttagttttataaatatatgcaaacctccatcacccaagatatattctgtttttatatatttttttatacatttatatgcaaagttaaatttgtccccatagaatttacgtatttttttaatgtatttttcaaaacctccattacttaaataatcaaataaaattccttggtctaaaaaggatacatgtatgtttctgcacctttttacactttctagtttattgattacttttttatctgcaaatatccatccaattctcattccaggaaataaaatttttgaaaaactaccaatatatacgaccccattattcatattatctagggaacagataggaaatatatgagaactattgtagagtaattcttcattaaatccatcttctataattgctatattgtattttttcataagattatagaatttgtacctattttcaggagtcattacaattcctgtaggattgtgataagagggtgtaatgtatgcaaactttattttatttttatacttaactaaattgtcttctagcatattgaagtccaaaccatcttcatttatatctacacctaagatattgaggttatgagatttcataatttttatagcagtattatgagtaggattttcacatattatgtagtctttttcttgggtaaaagatgacataataatatcaaagccttctgtgaatccatttgttattagtatatctttattacttatatcagcacccttgtttgtcatatattctagtaaatagtcaataaggggcttataaccttgtgcatatccatagttgagtaatttatgtccttctagtgaaattctatttaaaaaggatttttttaattcttccatgtcgaataaatctccatctggagaaatacttttaaaggaaatcaggtcagagctccaaggaatttcactttttataatgtccaattcattggcttttttagagtatgtattctctaaacaatcccagtttaatgaccatgtagtatttgaagacttattctttgatttaacaaatgtaccttttcctgaaatagagtagattaatccttctgattttaattcttcataagttaaaactacagaatttcggctaacttgtaaaagctgactaagctcccttgtagaagggagcttactattgtctggaattagtccttttgatatcatatcacttatataatttttaagttgtatataaattggttcattatcatttagttttagatttgaaaatatcaaattaccacctcaaattatttcatctaatttaaagagtattctataagtttatctaatagttcactgtacttaatacctctagcagcagcacttctaggaattaaactagtttgagtcattccaggaagagtatttagttcaagaacatatggaataccttcacttataatcatatcaactcttacatatgctttgcaattaaaaattttccaacaagtctcagaaatttcgtttactcttttttgaagttcttcatctaagtaaacaacttcttcctttgcacctttttcaactgagtatttagcttcataatcaaagaatcctgaatcagattttatagatattgtagggaacacttctccatttaatatgaatgaagtatattctccacctggtatatatttttcaatcattacaaattcgtcaacttccagaccttttctaactgcttcttcaacttcatccttagaatgaataaagaatgtggctacacttgaacctcctgagtttggttttataaatactggataacctatattatctatttcatcatagtcgatttcatcaactgattttactaaaacccatggagcagtaggtaggtttgaatctctaagcatttttttagttatatttttatccatacacatcccactgcaaagaggtccacatccagagtatggtatatccatagtctcaagtattgattgaatacatccatcttcaccaaattttccatgtaaagcaagtattgcaaaatctatatcttctggtatctttgtaaatatatcttttttatcatctattattacttttacaacttcatatttatttttatcaaggttattatatatctcttttcctgaatttaaagaaacttctctctctgatgatattccacccattataactgctattttcatattatacactcctattttaatttttattattttaaagtaaactttttatttacatacttaattatatgaattaacagttgaggatgaaagtaccactatatacgaagtttatattatgtgtggttttagaataataatctagtttaaagatatgtttaaatgattttttaactttatttatgttattatttttgctaaaattattgttatgaacttaagactagtcttaatggctataaatcaaggagtgataaattttgaaagctgaaataataagtgtaggaacagaaatattattgggagatatagtaaatacaaattctcaatttttagctaaagaacttgcatcattgggaatagaagtataccatcagagtactgttggagataacaaacaaagacttttagaatgttttgatgaaagcttaaagagaagtgattttgtaattactacaggtggtcttgggccaactggtgatgatatgacaaaagaaactgctgcagaatactttggtcagaaattagaactacataaaccttcactagaggttttggaatctttctttgttaaaacaggaaaaaaaatggccgaaaataatatgaaacaagtgtactttccaaaagatgctatagtactaaaaaataataatggtacagctccaggggcaattttaaaaaaagatggtaaatttataatagtattgcctggacctccaagagaaatgaaagctatgtttaatgagagtgtcaaaccttacttacaacaattcacaaatgaaatgctagtatctaagactttaagattatatggaataggtgagtcaaatctagaattagaaattctcgatataattaatgagcagactaatccaacagttgctttatatgcaaaagaattagaagttacaataagaataactgcaaaggctgaaaatgaaagagaagcttttaaattaataaaaccagtagaagaaaaaataaaaagtagagttggtaaatatgtatatactgaaggagatatttccatatctgaaggggagactgctttagaagatgctgtttctaagttacttgtagaaaaaaatctaacaatagcagtggctgaatcttgtactggaggtttggtttcttcatctcttataaactatccaggaatatcttctgtatttcttgaaggatgtgtaacatattctaatgattctaaaatgaaaagattaggagtaaaaagagaaactttggaagagtttggagcagtaagtgagcaaacagctatagaaatggctgagggcgttgctaaaggacttaaagctaatataggtatatccacaactggagtagctggacctggtggaggaaccaaagagaagcctgtgggactagtttatactgcaatatatataaatggaaaaacaatagtaaagaaaaatatatttaatggggatagaagaaagataagattaagagctactagagatttacttaatgaattgagaatacaattagaaaagctttaagttgttatgatattggatatatttgaagtgttactataatataaaattgtttttggaggcttttaatttatgataaaacatatattttgtgatttagatggaactctatatgaaaatggaaccataacaaaagaagatatagtagcaattgaagaaatagaaaaaaagggagtacagtttaatgttgctacaggtagaatttttaaacaagcacataatattatcaaagatagtttagatatgaatggatattatgtatgtgaaaatggttcatttatatatgataaagattataatgtaatttttaaaagaacgatagatgataatttagtaaaaaaagtcattgatagatttgaatcaagtgatgcacaactttattttaaatataagggtgatgtaattgtgggtagtgataccactgcttttagacattattctagtgactttatagttgacccagattttgaaaaaagaagtagttttgataatcttataggaaatataggcgtatgttctgaaaatttggaagagttatccagaatagaactttatctaaaaagtgagtttagtgaagtattagaaatatatttttctggaacatatactttaaatatagttcctaaaagtgtgtcaaaaagaggaagtatagagcatgtaataaaaacgttaaatgtaagtccagatgaagttgctactattggggattctccaaatgatatttgcatgttagaaggatttaaatatagttttgcaatgtctaaggcaagggaagatgtaaagcaaagtgcaaattatgtagtagatagtgtaaaaagtgccatagatgttataatggagataaatagttagtataaaaaatgactgtcctagagaagtataaaattatattctatagagcagtcattttaattatattcaattataagtttatataaatttaaaaattcttaagttaaccgcaatttgctatatgatatgattttattgtattagataaaatagagtcaagtatataatttatgacactattacaagtataagctgaaaattttaaatcattcatataatcagttttctttttgtaatcactataaagtttagtaaaaaacttctcaaaactactatttatagtaccacatttaattttagataaatcaacatcttttgcaaatgctccaagttctctttcataagtaacatgtttatttaagctatgcttaaattcccaacgttcactgtgagctacacagaaaaaatcacataaaaaatgacatatgactcctagttcctgactaagtctacttactgaaaagtatttagaaagactatctatattaagactgcatagatagtttattttagaaacaatcatattaaatgactcatctaaataatgtttttttaatttatatttagaaaaagcatcaggctttatattgccatatataaaatttttttcgcttataaagaatgttttattttcatctatattatcaagtattgattttgccataataaaatgggtattcattaacatatttacacctcgtatagtttattagacttattaaatatattattatgatatgatatttatgataaaagtttaatggtaaatatatgaaactaagtcaacagtatttatttaaataatttcaaccatattcataataacagtaaatggccaaatttacaatatgtaaatagtgttaagtttttatttatcaaatttaaaattaagtattagtatactttctaattaacctattggctttagactgtgagatttcaaggtgtttggctactttataagaactaccaaatttttcataagcatccaaaattatatttttttcatactctttaattaaggtgtcaaaatttttatttttataattagtagattttgagtcagatataataaccttattaatttgggatatatgtgttttatttccattattggtaatatgtatattttttgtaagaatgtttggtaagtcatctattgttatatgattatctgtacaagtaagcaagattttttgaattatattttgtaattctcttatattgcctgggaatctataatttgcaatagcatccatagcttctttagaaatagttttatttaggttgaagtcacttgagtacctattaaaataatattttataatttccactagattatcccttctttctctaagaggaggcaattttatttctataacatttaatctatagtataaatcttctctaaactttttttcttttacttttgaaactaaatcagcatttgtagcagatataattcttatatcaacctttttattttttaagctcccaactggagtaaaagttctatcctgtattaattgcaaaaattttgcctgtagattttgtggtatatctcctatttcatctaaaaaaagagttcctccattagctaattctacgagcccaactttacctttagtacttgcacctgtaaaagcacctgaagtatatccaaaaagttcagattcaagaagttgtggagatatagttgcacaatttattgttataaatgggccattagatctattgctgttgtggtgtatatatctagcaagtgagctttttcctgttccagattcacccaataaaagtacacttacatccgttttagaaacatgatttactgtgtttatgattggtctcatcactattccgtccataattacagtatcttcaattctaagtgcagttctgtatagtgtttctacctcagatttatatttttttacttgcttttttgtgtcttcaagtttattttttatattattaagttcagttatatctctacaattttcaacagtaaattctaagtttccattttcatcaaatataggggtagcagttatgataagctttttccctgtttgagtatcttgttccagtgaaaatttagtctttgtttttaatacaattggtatggggctttttgttgaatatccagagtcttctaaaaaagaaacattttttcctaaaatatcttctttttttagaccataattttcttcaaatgctttattacaatatattattattcctttatcatcagaaacacatatttcatcatgggaagcttctaatattttttgataaaattccaaatctaaattcatttttatattttcctcctaaatttttaatgatatattaaaataggtttaattgattaatatacttaaaatttgatatttatataagtttcagtctattttaactttaaataagttatatataactcattttacaattaaaataagtctaaatcaacttaaagtaagcgaaaaataaatataagaaaattgaaaacttattagtattattggaaagactagggttttagagtcgatatatattggtttaagatggcataatttttgcttaaaaagaagagtgtaaattgactaaataaaaatagaagggaatttaaaatgggagaaaaaagtaaagggtatgtatttatagcaatagcagggttattatgggctacacttggattatttggaaagtttttaatgggaaatggactgacatcagaacaagtagcatttacaagattgttttttggatttatagttttaggcgtatattcatctataaggacaccacaaatcttaaagataagcaaaaaaggaattatatattcagtaataataggaattatatgtcaggcaatgtttaatttatgttattttaaagcaattgacattgcaggtgtatcaattgcagcagttttactatatacatcaccactgtttttagcaatattttcaaaagtatgttataaagaaaatattactagaagcaaattattttcacttattctttgttttattggtgcaattatggcagtgactggtggacgtttggattttcaaggtttaaacgcttttggacttttacttggggtattatcagcaatagcatatgcacttatgccaactattagtaaaaatgctttaaaggaattttcaagttcaacaatattagtatacagtttcttatttggagctatatttatgattccttcttcgagaccttgggaaatcttaaattatgctaaggatttagatgttttatcttgtatgctaatgttaggcattgttccagctgcacttgcatatattttttatgcagcaggtatatctaaaggtgtagagttgtcagttgcaggtgttgtggcatcagtagagttagttggttcagtaataattggttgcactatattaggagaaagtttttccttagggaagttatttggagtgatgttgatgttaatatctgcagtagtagcacttaatctttcttatgatgaaataagaatattttataaatccaacaagttaaagcagattgaaaaaactgaaagtatttagaattatatacttaaaaaggatttattggtatacattttagaatccaacaaaaattataccaaattatatttggtattaaaaaataactatttataaattttatagaataaagtggacagtacaaataaaatataagtagatacagtttagactatctattttttattatatattgtataaatgtacaaattaatattttgttttgtaaatactaaataactatagaaaggactatatttatataaccatttctatagttattattttgtattaaacaaacttacagccctgataagaatttctagcctttaaagtatcatcaatttgatttaaaatttcccatttttttaggctccatataggacctactagttcatccctcttaccatcaccagtgagtctatggattatcatagtttcaggaagtatttctaattggtcacagacaagattgatatattcatcttgttccataagagttaacataccattttgtaacatcttttccataggagtatcttttataacatgcaatagatggatttttataccgtctacacccattttaccaactgcctttgctgtttccatcatcatattataatcttcaccaggaagaccatttataatgtgtacgacaacctttatatttttagactttaatttttcaacaccttcaacaaatgttttataatcatgacctctatttataattttagatgtagaatcatgaattgtttgaagtccaagttcaacccataaattggttcttttatttagttcagataagtattctacaacatcatctggcaaacagtcaggtcttgtggatattgaaagacctatgacatcttcaagttctaatatagtctcatatttttcttttaaaacttcaagaggagcatacgtatttgtataggcttgaaagtagccaatatactttgcatgaggccatttttttaacatcatttcttttatattataaaattgactgataagattatctttagggtttccagcaaaatcacctgagccttctttgctacagtaggtacatccgccataaccaagacttccatcaatgtttgggcaggtaaatcctgcatttatagataccttaaaaactttttctccaaaagtatttctaagatagtaattccaagtatgatatcttttatcatcaaaagcatatttaaatttatccaaaaaaatcacctatttctaataaaattgtacgctgagcttgtacaaaaaacatattaccacaaatagataacttaaacaaattctattttaagtaatataaaaatacagcgagaaaataattaatattttctcgctgtatttccagagaaaaatagaactagtccaaataatattatgaaaaaagacattatcgatactataaatctagataaaaaaagtggagataatataaggcatataccaaatagaatcttaactatattccaagttgtaaatttagaataaggattattcttactatttacaagtgctactagttgattaaagattaaataaaaccctaaaaataatgaaaatatgctttgtattttttgaggaaatacaaaaagtaatatacatgcaattattagaacccattggatattaatagagggtttaatttcttctttagtagcatatctttttagttcattaatattttttaaatttaaatatgcaaagaataaaagtgcaataccaaaagtccaagaaattaattttatacctaatgtcttaaatgtaaggcataataatcctaagataatgagcaatactcccattaacataaatttagtagcattttcttttttattaaagttattaaaatcgatattaaaatttgtgtacataaaatcacctccaaaatcgatagaacaattataacagaaattcatatccaaataaagcctagtgtataaaaattaaactatacttagtaattaattaataggttgtatcatagacttctattaatagaattatatagaaggaggtttgtccatgacaaaattatgggcaataatatttgcattattagcaggtggttctacagctcttgaagcttttataaatggagaactaggaaaaagtacaacagcattagtggccacctttataagtttaactgtaggagcaatattttttttggcaagtataatagttacaggtgacttaaagtgtctagtatctataaatggttttaattataagttgttattaggaggagtatttggaggtttaataatatattttacagtaaaggcaattccaaatttaggagtatcaaatacacttatattaacacttgtatcccaagttttagttggattttttattgatagcgtaattttgggacaagaaacaatgcatttatacaaatacataggggttatacttttaatattagggacattctttatagtgaattaacaatttaatataatttgctatgcaactcaaaaatttggtataattatgttaataaaacaaagttagatgaaagaggtgttaaaattggctgatgaaaaatttgtaatgtcatttagtggtggtaaggatagtatattagcattaaatcgaatgttgaaaaaaggatataagcctgtggcactcttgacaactataagtgaagaacatggaaagtcatggacacataatttagaatataatatgcttaagcaagtaagtagcaatataggattacctttattagttgctgagtgtggtgtagaaggatatgaagagagctttgagagggctttaataaaagctaaaaacatgggagcaacgatatgtgcatatggagatatagatatagaaagtcatagaaaatgggatactgatagatgtgaagcagttggtatgaaagtagatttaccattatggcaagagagtagagaggatttagtatatgaatttatagacagtggattttgtagtgttgtaacaaaagtaaacttaaagcacttaggagaggaatttttaggaaaaaaattaactagagaacttgtggagaagataaaaaatgctggtgcagacccatgtggagaacatggagagtatcatacatttgtcgtagatggtccaatatttaaaaaacctgtagaatatgaagtaaaaggaactttaataaaagatggctatggatatttagaaataaaataattacataaataaaatacctattatataatcctaatttttgcaaaggtctaatatttgcaagattgtataataggtattttttatttagatattttcatatattgctactcttatcatctaagcaaccttatttagattagagtctaatgtagaaaaattcttttttagaaaaactaatgataaaataagacatataaactcagaaacaatagtagtcatccatattccttgtccaccaaatattagtatcattgaaattagacttaaaacaactattacaagccctctaccaagagatataacagtagaaattgatggtttttctactgatacaaagaatccagaaattattacattaattcctaccaataagaaagatatagagaatattttaaatacacgaactccttcattgaatagcattgtttcttctgggtgtataaataaagagactattggtcctgaaaaagccatacaaattgcaaatacagcaactgatgctattattgtggcttttatccccatttttaataatttttttacattatctatatttcctgcaccataataaaagctagtaagtggttgcataccttgagttatacccatcatagtcataagtactaatgtatttatataatttatgacactataataaataagagcattttctccaatatatttagtaagacttaagttaaaaagtaaaacaactataccacaacttaattcagtagttgaatcaggaaaacctataaatacaatttttctaagtgtcttaaaatcaattctaaattttgaaaaattcaaagtagagttttttcttaaaaaatgtattaagaagaaaatagtagaaaagacttgagacaaaacagttgcaataccagcaccttttacaccccatccaaattcaattacaaacaagtaatcaagtatgatgtttgtaagagcagatattattacaccaacagtagctaatattggaaagccatcagtttttattataacttctaaagaataagacactataaagaatccgttaaaaaatattattattcctaaataatctttaaccataccaattgtagattctgtagctcctaaaaatagtgctaatctatctaaattaaaaaaagttatagctaatataattattgataatataattattgatactaagttaaatgaaaagacttcgttagcagatttaatatcttttttccccagatagattgcaattatggtagatgcaccagttgaaaataatagagaaactgcaaatataaaattaataaaaggcattgatatattgacagcagctaaagccaattctccaactcctttacttacaaatattccatcaaccattgtatatagtgagaaaacccacattgcaactacagatggtgctaggtatttaaaaaatcttttacctagactcatgttttcgtttatagatatttttgtatccatttattatcactccctgtaaatctattataaaattacgaaactattaattaataattttatttctaatataaatgataaactatggtataataccaatgtcaacagcaaatagtatataattataaattttattaaataatagtgattttaagggtcttataaatatatcttatttatatattactgacatttaactgacaaataggaaaaaggtactttaagtgacatttaactgacaaatggaaaaaaagcactttgagtgacatttaattgacataaaactgaacattatttgaatagtattttgcttatattttcagatgtttctttatccatttcatctaataagtgagaatatcgaatatttattcatagctatttttatatctgcatgtactaatattttataaatagcttttatgttagtacctgaaagtaatatcaaagtcgcatttgcatgtattaattcatgtacttttatatctctaggattattatctcttaatagttttttaaaatgaacaacaaaagttggttgaactcacgggttgaatcttttatttaagcatatcaaatcaaattcatttttcaatataccctgtaattttaacttattttgttttaatttttgccctttaagcaaacttataagttcatcaggagcaaataattttcttttggatctagggattttagggtctttgaagattattttattgtatacataaactaatgtttgatttacatgtgagattttttatcaaggtctacatctgaccatataagtgatacagcttcaccaaaacgtaatccaagagttagtatcaaaaaaattggtatacctataggaatattttttgatttttctaataataattgagtttcttgctttgtataaaacttagaagttgaactattttttttgattggggttgtaacaaaatcacaaatattttctgatatttcttttaatctataagattctttcaatactgattttataaaatcgacttggttttttattgaatttaacatgtgctcattgtatatgttatttatataagactgtaaaatagaaggcgttatatctattaatttcatatgttattggaaaatcgaataataataacttggtattcgaaacttttgataaagtaataaaactacatccaaatgcaaaacctgtttttcatagtgatagaggttttcagtatactagtaaggtgtttgaatcgaaacttttagcacaaggtatgatacaaagtatgtcaagagctggtcgttgtattgacaatgctcctatggaaggaatttggggaattttaaaggtggaaatgtactatttaaggaaatttgatacatatgaacaattagttaaaataatagagacttatatatattactataataattttagatatcaaaagagattaaattctatgtctccacttgaatttaggaaatatttaagtacagagatagcataatttattttaagtagctctaaaaaaatttaaatatctagggttttatttgacgtgctcttttttagatagtaaactttaaaatatagatattaattatatgaatataataaaaaaagtactaatgagttacactagtactttataactacttttacatgttttaactgtataaaacagtgggtatagttcagcaggagtgactttagttttgaactaaaaatcaagttcaaaaagaataaacattagtatttgaacttcactctacgtctaaatagattgtagttcttcttgtttttattataccacaaattggtacagatattcaaaaataatatatttatgatataataaaaatgtaaatagttttgcagtgagcgatatttgttacaaagtagggcttaatgcttgaaatataaggtgttgagggtatatgataaactttatcatttgcactactcatggttcactgcaaatttaagagagttgcacatgtgtaagtattgaaaatgcccagtttattttggggtaaagttttatattaactaagtggtatggaaagaggtttttcagaagtatatgtacgtctatattgtaaagttttatattaactaagtggtatgtaaataaggaaggtggaagtcaatatgcatgggtcaaatgggttttatattaactaagtggtatgtaaatacgaaattagagtttgaaatatatgactacataatagttttatattaactaagtggtatgtaaatttgtgtcacatcattgtcacttctttagaatatcaaaagttttatattaactaagtggtatgtaaatttttaagcaggtgattaaatgattaaaaaagtagaaaagttttatattaactaagtggtatgtaaataataacttgtcaatgtagttatatgcaacaacttctatgttttatattaactaagtggtatgtaaatgaattatatattatgaaaaaatatggagtcacagagggttttatattaactaagtggtatgtaaatttgcaggttttccttatagtttgccatatgttcctggttttatattaactaagtggtatgtaaattactttagcactagtaaaggtagaattattaaagtgttttatattaactaagtggtatgtaaattcgaatgtgaatggcacttctatttctccaacttttggttttatattaactaagtggtatgtaaatagtataatgttgaaaagttagagagtacaatcaagaaattttacattaactaaaatgtatagaataaaacatgtatttatacttaaattctgtacctatataaaaaagtgaactctgtcaacaaagcacttttttatatagataaattatcattttattttaagatagaagatactaatgctaaatgtttatcattagtatctgtatgtacataaaagtttaattttttatataaatttgatctttagaaaaatgagcagtatcaataaatatattgtctaaattttttctaggaactagttgactagctataagattagcttcaactctttgattgttagactatgaaattaaatctaaaggttcattcttggtcgtataaatagctttatcattcgtatgtactataacaatttttgccatctgcttttgatagataaagagctttatcagctttagaaaataaatctttatataatttagttgaatcatcagtgaaggcaataccaatacttaatgttattttatgattgtcctttacttttattttacttgcatcatttaaaatatcattagtaatttttattattaaatcctttgttaatgattttataaatattgtaaattcatctccaccaattcgagcaactatgtctttatcatgtgtgttatgtaatagtatttttgatacagcaactaaaacttcatttccctctaaatgcccaaaagtatcatttacagttttaaaatcatcaatatcaataactaatagagcatcattatttttggaatcagaactacatagatactcttcaataagattttgtgatactctttgattatataattgtgttagtgggtcacgttgagcctgattaattaagctttctaatttagatttatcttcagttatgtcttttaaaacgcctattgttttgatagggttatggtcactatcatatataactgaacattgaacacgaatccatctccattcatttttagttaatgaatttacttgtcttatctcaattgtttcacgaagatttccatgaagtacttctagtagttttccaatatcatcaaggtgaataattttaccagattctaatagtttggagtaattttttgtttcaaaattttctaattcaatttttttgtcaatttctacacgttgatattttataagggtatcgttttcaatatcatactcaaacatgatatctgtaatattttgcaaagcaatacgatatcgctctctttctaattttagttcagattctatgttttttagttgggttatgtcagtaataatactattaatttttactatgccatcactatttaacgatttcattccagaatctaatacccacattaatgttccatctttttttcggattctatattcagatgaatatgtaggtccttttgcaaaacatcgttcacaatcttctagtgctttaggtaagtctggtggatatacagcacccactgctgaaccaccactcatttccatgaactcatcatatgtgtatcctaatattttgggcaatccctcattgacatagaaaaatgagtatgtactatcatcattgctaccttttaagccaccattgatattatttgtaatcatttcaataacttctgttttttcctttagtaatctttgcaaataatcataactttgagttccaattttagtgggaaagtattcatcaagttgcatttcaccataagggtttgatatgtgcatgtgctttactaataattttcctctatcctcaattatctcaaatgtacaacgttgatttacctctaaaatcatttgagcattttctttagttcgaacagtatatcttcctaataccatacatctattctcatcttcacttacagtttcaaatacatcattatttatatcacaagaaggaatttcatcttgacctgcataaaaataattttttatttcattaaaagaagtgagaaattcctgttctcctggtccaatccatgtaacattttcacaaaggtattttaatacttcattgatatctcgatttatataaaaacttgttataatatgttttgctaatttgggtgctttttttaggagtatgctcatgatattcctcctttctttttgctattatattttaattatattatacatcaatatatttaaattaaaagctttgttaaactatgatatctttgtcaaataagttaattttaacaaaaaagaactgaaacaatatatgcttcagtacttaatgtcaatatcttgtatagatacatatttataaactaatgtacaagtttaaaaaaagaaagataattttaatttattttaaaataacaatgttaataatcatttttatcaaattttttcttgtttttctccttgtttttatacatttttttatccaattcaactattgtcaattttaaatttctttttactgtatcaacaccataactaaatgaaagatacttatatttagagaatacttttaaaaaattttctcttaaggcttctagttgtgaataaacataatttttgtcaacatcactagagaatataacaataaattcatctcctcctaatcttataatagaagtagaatttattaattctttatttaaaagtgaaacaaaatcacataaaatcttgtctcctacattatgaccttcatagtcatttatcattttgaaattatctaagtcaattagtacaatataatctcctataaatatgtcaaatctatcatttaaatattttctattatatgctccagttaatgggtcagtaattgagtagtgaagatttctcttattttcttcatagagttttgttatatcattggccatagtaattatgtaggttttttcatcaacatctactttgtattctaaaacattccaatagcttgtagtatcttttttaaactctaaaatccaatttgaaattttatcataaggataatttttttcccaatctaattgaatattgtgagaatccgtaaaaaatttagcaatattatcagggagtttcttagctatttctatattagtcattccaagtggattatcttgcatataacttttaattaaattttttaaattatcatttataaatataattctgtagttagaatctcttataattagaaatcctggaaaagttcttaaaaaaatttctttaaacatattaatttctccaaaataaaatactttgtactagatttttgttaaattttttattttatttacatctacatacataccttgggcaatcgaccttccatcaattgcagaaaggttacattgtgtatacataactgtgacaatttgaccatctcgttttatgaatctatataaaaatggttcaattttatttgtgtcaatcatatccaaactttttttataaacaaagtctaaatcatctggatgaacaattgctcttaaatttccgcccatctcaccaaaaaactgttcttttgtataacctataatgtcaaacatttcttcattcatataagtaataatcatatcaccaaataaatcgtagcgaattatacctacaggcaacattgaataaaattgtgataaaatattactttcatcaagatgtgtatttgtcattttaggtattgaatatgattcaaattcatttatatagccagcagttttaattaaatccaaatgtaattttgctaagagtaatttattttctgaaattatacaatttgcactaaagtagaaattgctatatttttgatgttcagaagcttcatctgataaaacggcttctccactaattaataatgaatctgattcagtattatgtggggttatacttttgtaaagaatagaaaattttttacctttaatatgtttttcaaaatgttctattactttaggaaaagatgtaatttcagttttgttgtaaaaatcaaaccattgaatgtcttcagtgacattagctcttagttttttcatatcttgcataataaaaaatccatcaaatatcttctctattaaagattttcctatatcagaatattttataaacattttctctgaattattctctttagatagtaatttttcaaattctttgcactccatgggttttgcataataataaccttgggcgatatcacaatttatacttttaataaattctacatgttgttctgtttcaacaccttcacatactgtaagcatcccaagagctcttgcaatgtttattatagagtacaaaatggttgtatttttaaaatcatttaaattatgagataaaaatatcctatcaattttgattatatcaaaaggtagattttgcaacataccaaaagatgaatatccagaaccaaaatcgtccattgatacagaaaaaccataagaacgaagttcagctagttgttgaataattgtatttgtattttctattaatatattttctgttatttcaatgctaaaatttgatgtagagacgctgtacttttcagtaataccttttagcatacttggaaaattagggttaaaaaaatgaagacgagaaaagttacaacaaattggaacaaaaacatcattgttatcaatccatcttcttatatttttacagttctcttcaaataaatgcaaatctaattccgttatcagaccaaactgttcaaataaaggaataaatttatctggagtaagaagtcctttaatagggtgtctccatcttgcaagtgcctcacatccaactatagtattattttttatattataaagtggttggtaaaatacttcaatttgtttagtttgtagaacatgtgatatttctgataagaactccttatcattttctaatttattgtaaaaactattatctttaaaatcaaatagaatgtatctatttttgccttcacttttagccttttttaaagcactatatacttggttgaaaagtatcaaagtagtcatgtttggttcaccattccagatagtgctgccgatactaaatgtaacattggagtatatttctttttcattaggaagtcttatttttaattctcgggagctctctataatagttgcacccatattatttaactctttatttgatacatttggaagtacaattaaaaaaccttctccttttaaataagcgactattccctttgattctggaataaagtgcaataggttttgagttagagtaattaataaattttctccgactagatatccatatatatcattaaataatttaaagttatcgatatttaataacatgattcctatatgtatatttttcgaaatacagtcatcaatatattggtacataaattctctgtttggtattttagaaaaaaaatctatttcatttaaggtttttaatttaaaatttctactatctaattccttagataatacttctacctttttatttaacatttttatataattatgattttgcatggtattcctccataagatactttaaattttgatgacaactgtatttatgctagaagtatttaaatgttaatttgtaaataatttaaatgctaaattttaaataagtatttaaaatgaatatacattaagttatttgctccaatgctacaaatacaaatattttttagtttagtaataatattagataaaattagttaatgcttaaattatagtatattgaaagatttcctttttgaatgcaattatatcatattttttcataaatagatagattgtgagctgtatagttagtaaggtagagtttttttataattaattttaagtttaatgatttttcaaaggcataattattttattcataattaactttttatacataatttaataccacataattaattttagttattaaaattaagtttattcttgtattttttgttaaagactataataaatattcatttactaaatttataaactattaatctatagaaatcagttttaatatgaaaaatattacatagagatggatataatagctgtaaacataaaactatataaaactaaaatatatttataaaaaagttgaagttataaatactatacctaacattacaatataaaaatattttaataattaattattaggatgtttattttcctatccttgttttaaagatttttttagtatattctaatattatagtattatagagtaataatgttgatttaaaataaaaataggatttcggaggagtttattatataaatgaaagattactataaaataggagagatatctaaaatatatggaataggtagagattcattaatgtattatgaagaaataggcattctaagaccagttagagatataaatggatatagaatgtataatatatcagatatatggaaattaaatttaataaaagaatttagaagcttgaactttccaatgaagaaaataaaagaatacctagatgacagaagtatagagtctacgaaaaatattttaaatgaagaactcgatttaattgataaaaaaatagctgaatttataagccataaggaaaatattataaaaagattgagttcgattgaaagtgtaattcaaaatacaaaaatagatgagatagaggttgtatatatagaaaaaagaaaagctttagaattaaatgctgatataaagagggatgaagacttcgattttttaattcagaaacttcagaaagaatatgaagatagatttaatatacttggaaacaacaatattggttctgccttttctactgaagcaattaataaaggtatatttaatgagtttaaatctgtattttgttttctggaaagtaatgagaaagtatataatatagtttttgatgaaggatattatgtaactttaaattatactgggagtaattctaataataagatgtatatggagaaggtgtttaaatttatagaagaaaataattataagataattgctgaccctatagaaatctataagatagatatacatgagactggaattgtagaagagtttgtaacggaaattcaagttcctataactaaatagccatatttcaatggattagatggtaaatagaatgaaaaaatgttgatttgccaccgatttgctactgtgttataaaatcggtagcaaattatattttaaattataagatagcatgaaaaaataattgtttagggggttataaatgtgaaatgttctaattgtggaagtgtaaatattgaaaagggtattttaacaactggtggcatatatgctgaaactattggattaaaatatagaggagatggaaaattagataaagttataaataaaacttttccagtacaatctactatatattcagatttatgtttagattgtggcgaaatagttagaacctatataaaggataatactgataggaattggtgtaaagataagaaatagaataatttttgaagtatattaatatttgaagttgaattttattaaagatacaagtgaaaaagtataaatgggaagaaattgttatatggaagaaaactttgcatataggggagattagttttttaatataataacatttttaaatgtagataaaactaaaaagggttctctagaaaacaatttctatttaattatacttacttaccaataccatcacttgatgtaaacaagattctactacattttctccgtactctagtataaaatcatctagctgtgtatctataaaatcacaataatcatataaactactaatataagcagttaacatgtgtgtacatttatccatttcatctctaaacatatatattactatccccctaaaaaactttcataaaacaaaaagaacaatatctttttggcaactggctgacataactcatagtttattttataagcgttagtccctatagctttgcgtcactaaatttctctagttttgccgatttagttttattctacaactaaaataatacactaggataagttattgttcaacatacttgtcagaaaattgaaatatttaacagtatcttaacaatatgaaatctatttttcactcaagaaacaaactatacatgtagaatatttaataaaaattatatttagttttgtattgaagtttttgtattaaaaagtttagttcacaagagttacttggctagataatagatgagcaaaaatatcttgaaaaaatatatatgaatggcaaaaaacaagggatgaattttatatagactcatcccgtaattatttatatattgaccttgattaaatatattattatttttaagcttcaatttttatattatatttctaaagtttctataagaggattatcgctaaataattttaataaatttgtttttttatatcctttaggtaacttagtatatataactacttctaaccaatccccatcaaggcgtttaatattcatgtttataatttcaatattagattttttaaatttaccttcaatatattctatggaatcagtgctgttagaaattttaagagaaacttgctctgctgtagggagtttcatccacttcctatctctatgaagtgttatctgtacaataacaataatgatacttgaaacaataccaactaagtataatccagagccaatggcaagacctgtaccggctgttgcccatataccagcagctgtagtaagaccacttactgattgatttctaataaatattaatccagcacctaaaaaacctataccactgacaacttgtgctgcaacgcgggctgggtctagaccaatacctggagtacccactatatcattaaatccatacttggaaacaatgattataagtgctgaagctaatgccactataaaatgagtgcgtattccagcttcttttagtctattctttctctcatatccaattaaagccccacagaaaccagcagtaatgattcttgctatatattcaaattgaatcaatatatgatggttcatttatctagcacccccttctatataatattatatatactataatactacattttttatgtgaatatagtaaagtttaaaatttatataatagttatatatgaatataaaatgtataaacgtatattatgtatataaaaatgatagaaagcatctaattttaaatgattaaagagcaagcttaaataaatcaaacttgctcttttaacatagtgtatgtttttatttgtgatagttagataaaaatttatctgtgttttttacatctgcaaaactgttctgtagtgatgccatgaatacttgatgtacagtatttgcattaatttctatattattccaagataaattcttcgttgtacatgcatcgcttattagagttatgtcgtatcgaagtttctttgctgttcttacacttgtatcaatacacatatggctcatcattccacagattactagattagtaatattttttttctcaaggatactttgcaaatctgtttcaaagaaactatctggtgtgtgtttaattataatttcttcattatctagtggaaaaacaattttatttatttctgaaccatgagtattaggaagaaaaaaagaagctgttttatctgttgatatatgctgtatatgaataactggtaaattgttttttctaaaaaacagtagtatttttttagcattttcagcagtttcttctgattgaaataattcacattttccatttttaaaataatcattttgaatatcaatcaatattaaagctatagacatgattataccttctatttacttttattataatactattgtaaaaaatgtaaattacttactttttggtatgtataggattacttattgtagcaaattcctttattatctagaatttcttgttgaccatgttcaagcatatattcgattcctatttcttgcattatttccactgcttttaacatttttttaccacgattagtaagaaaatattcaacatgtaatggatatccagcagaacttattttatcaataatcccaaaatcacgtaactcttttaattgttgaatcaacattttttgatttattccataaatattatgttgcaattcagaaaatgttttattagattgtcttaattcaaatataaggatagttttccattttcctttgattatgtcatgtacaatttcaagaggacatgtatattcagctcttattttcatagcatatcacccccagtaaaatgataataaattatatcacttgtcttgtgatatgacaaatatatatgaactgtatataaattttatgttttattaagttctaaatttcttctattgtagttcatatttagtacataaataattagtaagatataagtaaataaatatataacatgactatagaaatttaactttaaaataacttatgataatttagaggaggaatatatatgaatatatcaagaaaagctatgaaaataatagaattagcacaaaaaattgcaaataagagaggtatttcagtagaagaagcttggagtgaagcagtaacagaatataaaaataaatacgaacatattgcatagatatttaaaaatttagaatatttggtagaatataatgattttaaatgatactataaattataaggtatatcattattaacatagaaggaggatatctgcttgattgtaaaaatagataatactttagaaaaagaattttggcaatatgtatcacatgaagaaagtttaaatttattcataattggatacgttgagaattatggatttagctctcaatatcaagatatatggtctcaggtagaagatggaaatataacctctataatattaaaaaataagtcaacacttataatttatagttttaaaaataattttgatataggagaaatgaagaatcatataaaagatttagatgtagaaagcataagtggaaaaaaatgtgtaatagatagactaataagtaaatacaaagatttttatgaaaaactagataataaattttgtgtattaaaagaaataaaagaaatagatttttccaacatgaaggagtataaaatagaaaatgctcaggaaaaagatattgatgaaataggaaaacttttaaataggtcagactataaagtaagtaaaaattacatagaagaaaggaaagaacatttaaaagagggaaatgtaagagcatattttattagaaatgatgatactatgattagcactgtgtcaactggtatggaaactagttttttggcaatggtggtctctgtaagtacagataaaagatataggggaaaaggacttgcaagttatatggtttacaatttgagtaaagaattattgttggaaggaaaagttccatgtcttttttataataatgatgtagcaggtaaaatatatcataatataggatacaaagagataaatgaatggacaattctttttaaatagctataaaaataataaattttcgtgtaattcttaacgtgtattgtataatcgctcaaatacttgaaaggtgtctagtagatgggtttgttagcatttatggtctccttatctaagtaaagttccctttggaaatcggtgaaatactcttttacatttcatgagtcctataaaatctatgacataagaaagacccagttacattgagtaattgggtcttattatcatatatattgtgtgcttacatgatatagttcatttctataaacgtagtatttcgtaagtgggaaccaattttttaacaagtgattatttgaacaaagcaataaggatatgctagcagatggattttgtataatttaaaaatcaatatttagactctatcatgtattttcatcatcataatccaatttgaaattgtatctaaaaccagtttgctatttccacagttacagtggttactagcttgttctgcttctgtcataagcctaaatgtaagggatcggacattgttgagtaaatcaatctctttaccaacagttctataatcaataaaatgatcttgtgttgcacctaaaatcaaaatgtcttggtttatattttttgcaatagaatctatttgataatacttgattttctgaaaatattcatagggtgtagacgcttcatatgcgtacattccatgttttaaaccccataccaccatactatcgccacttttcattttttgctttattataaaattgactagccattttgttttgagttttagcagtagtctaagtagattttgcatttttattggttgtgaaccaactattatgtctaagaaattggggaatacagaccaagctaccacgcgttcaattcgtttttcgaaggctgctgctcgtggagcaagaaaacctcccaaggaagcacctacaatagttatattctctaaatgaaaataatctaaaattgtcttaacgggacgttcccattgataagtaaagtgttttccctgcaaacgcatcactccaccttgaccaggtccctcaaaaagataaatatcaaatccctgtgacgcaagataaagcattgggaaaaagaattcttcaaagtaagaatcatttccaccgtggagcaatataacatcttttacctcgccttgcgcttttgcatacattacaggtagggtgatattttcatatggtacatgaaaaatttgtacagttccatttgagaaatattcagagtagtagttgtagaatagagtagttgcttttttgtagactgatattttatcagggtcaccatcatacataaaaaattcactcatacgatagtaagcaattgcattttctgtgcgtccatcttgttcagcttcttgtgccagatacataagttctgttttccaactttcgctatcgacaattttagaggaaactttttgtatatcttccaagcgccccccatcccacataataatcctgtttaactgaaaattaaaattggcatttgtattaaggtaatatagacctttattaaaagaaattttatttgttttcaatgtcatcactcctaaaaagataatgcatagcaataaagagtaatctttaatgctatgcatttattgtaacaaatattagaagtactgactttcaaatagacgctattggcggataaaatatattttacattttcctataagctcacttgcagtaatgccaagatattttttgctggaagctgagaaatgagacggtgaactaaaccctgcgtccatagcagctgaggtaatatctccactttttaacaataactcataagccttgcgaagttttgataaagccaaatagctgtttagtgatactcccatttgttctttgaaaagatgagaaaaccggcttttggacaattttacttcggcacatatctcaaaaaagatttcattgtgaatgtgtgtggactttagaatatgattcaatgcccattgtattctactgtctgtaatagacgaaatatgataatttaaattcaatagacggaaagcttgttttgaaaaatcaatatagctttgggacaatccttttacctgacaagctgtataaatattttgtattcgttcaactataagattatctataacgaaaaaagagtgatttagtaattggtgttgactaatattttgggcgagtatgcttgtatcatctatcaagaaaaccaacattttattatctttacttgacaccgtatgcgatacattggaatcaataataattcctttacattgtaatgattcgcccttatcaaacgtcacagataagttaccagactgtgatataataatatgttttgcaagatgtttatggatagttggttgtctatactctgtatctaaaaatatatggtcaatcattacacaaatggtagtcatagctgtcaactccttgttcatagcttagcatattatacagtttttaacaagaaagcttagtgattacaagtatttaaaaatcctattttaggcaatgaaaaataaaaaactctatcgagaattaaagtatttataaataactatatttttactatgattcatgatagagttttttaaaatttatgatactattttttattatttaaataatcaagtgttttaagtttataaccttctttttcccaatgtgtaagaacctcatctaatatctcagtatttgttgatgaatttggatgcagtaaaactattgcaccaggatgagttcttgaataaattttgtttttggcaaattcatgagtaggttgtttcttttcataccaatctacataagcaaaactccaaaatattgatttatatcctaaatcttgtgtatattttaaagattgttcgctaaatttacccattggaggtctaaaatacttaggcatttcttttccagtaacatctttgtatgctttttctacacttgtaatttcttctttgaatttttcaaaatctgtaatacctgccattgatggatggctttttgaatgattacaaactaaatgtccttctttttccatacgctttattaactctggattgctttttatataactttcaactacgaaaaattgagctttagcattgtgttttttaagcgtatctaataattttggagtgtttccactttcatatccagcatcaaatgatagatatataactttttcattgggatttcctacataataagctccgtattttttaaaaaaatcagcttcttttataggtgatggctgtttaccatcctccctagggttaaaataccaatcatattcatgtgtgtcgagtgttggactagaaatttgagtttttgttttatctaatgatttaaaatttatactagcaattccaaaaagtattagagcaaatgctcctatcataatgtatttttttaggctatcttttttcacaatttcacctcttatttaaaatttaaagtatatttcttataatatagtttgaatatttatagttaaaaatattcacatatacaaataataaatgaaagaagtttactgtaagatataaagttgatattaattatcttaaataaagtgtatataaatgataaaatataaagagaaatgattgtaaataagttaggctggtttaacttgaagggatataaaaatggataatataataagtgtattgaatgatgttgtttttttagatatagaagttagtggattagattgtttaaattcagaaattttagaagttggagctgtcaaggttaaagactggaaaatatatacctatgaatcattaataaaaaacaaatttgaggtacctatagaagtattctcagtatgtaaaaatttagataaaaatgatttagaaatagctaatgaaatagaactggtggaagatagacttgtaaattttgtagaagatagtttcattatatgtcatgatttaagtctgaaaaaaaagttttttgagtatcatatgccaaagttaaaaaacaaatttattgatttaattgaattagcagttattttagaaccatatcataaagattatagcttagaatacttaaaaaatactttaacaaattgtaattctaaagtggaaaatagagctttatcagatgctattgatataataaatattgtaaattgccttttagtaaaatttaataactatgaaaaaactactttggagccattgagttttaaaataaattcatatcttaaaaaatttaatcttccaacatgggaatggagcaaatttttagaagaggcaaattatgatttatcaaataatataaatataaaaaaagaatataatatatttgactcaaaagaagaaaagaagaaggaaagagaaaccttaaaaattttaaatgaagaagaaaaaaattatgaagaattattaaaatacaaaactatttgggagaataaagaaggatttacatatgaatatagacctggtcaatatgagcttactaaaacaataagagagttgtttagaaatagcgaagatgaagaaaaaattgcatgtatagaggcaccaactggtataggtaaaagtgtaggatatttattgcctgcaatattagaggctagaattaataaaaaaagattattaatttctactgacacaaaggaattgcagatacaattaataaataaagatattccaaatgtgttagattctttgggtctaaatggaaaagtaagttacggatatataaagggaaaaaataactatatttgtatagatagactggaagcatatatagatgattatgagtctcaaaaccctactaaaggagaaattttatctttaatatttttgaagagattagttgaaggtggcaagtatggagatatagaagaaataaattatttagtgtttgacaacttcaaggaaataagtacccacttaagaaatgtaagttgtgacccaaatatgtgcagacctaaaaaatgcaaaaaagattgtttatataaaaacagaatagaagaattaaaagaagaacatataacagtagtaaatcattcactattagctaaatggccgtataaggatgaaaaacctttagaaaatataatagtagatgaagcacataatttgactgaaaaaggatatgatttcttttcaagcattataaattcaaagtctttaaggtatttattacaagaaatttatccttacgagtttattcaaaatagtagctttatatataaaaaatatagtagaaatatgagaaaaataaaggcttttgataaattttataatgtattaaaaattggaagagaagataaacaaaaaattgctagaagtataaatctcattattgaagagatagattcaatattaaagtttggtaattgtaatgaatataataatgtaagtaattataatttaagatgggaactgaatttgcaaatagatgaaattgtgggaaaactaaaaaaggatggtatagatactgaaataagttatagagcctatagtgaaaagataaagttgagttgtgagaaaataataaaaaatttagtttcaataataataataatttataggaatattgatgatgatagtatagataaagaagcagatatatataaatttggaaaggcaaagacaagagatttagaggatataaagattatatttgaaatctttttagagtatgatgaaaaggatgattatgcaaggatagttgaaattgataagaattataatgactttgaatttcgagtagtaccattaaaaatagcagatttatttgaagaaaatattttatctcaattagaaaaaggaatatttttatcagcaactttgagtttatctgaaagtatgtcttattttaaaaatacattaggaatagacagagttaagaatgtggaaaagattatagaaccaatttttgattataaaaatagagtctctgtagttggattttctgatatttgtgagtacagaaattctgaatttccaaatgagatgagtaaaattatatctaatatatcaaagattacagaaggtcatacattagctctttttaatagtaaagatagacaagaaaaaacttatgaaatattgaaaaaatacttacatagttttaacttagaaatttatgctgataaaaaggggattagacaccttaacgatttaaatagaaaatgtgtagtacttggctcaaaaggatgttttgaaggcgtagacattccaggggatggtttggtttgtgtaactttagacaagcttccgaatctaaatccaaaagaccctttgtattttactataatgaagaagtatggtatagactactatactataaattatcctcaaatgaccataaaggtaaagcaagctatggggagaattttaagaagcaaatatgactatggatgttttgtgatttttgatgtaggaactaatataagtgttttaaagagattagagaaagatttacacgattgtaaaatttcaaaggttaatagcaatgagttttatacttatataaggcgacatttaaataaatctagaagtttaatactaaaatctgttatatttgatactataaaagcgttgaatgttgatgctaaaatggataacaatgatgttgataaagatattataaaaaaagatataaatgaaaatataagacaaagagctgtaaaaggagaagtgtaccatattgatattataaaaaaagatatgaaagtaaaatattttgatagaaactatcttataaatttagatatatttatgagagaagaagataaaaattaagagtgggagtgagatatttggcaaaacaaaagttttatgctgtgaaaaaaggtaaaaatataggtgtatataatacatgggatgagtgcaaaaaacaagtaaatggattctcaggagctgaatataagagtttttctacttttcaagaagctaaagaatatattgatgggtcagaaaaattgagttttcaagaagataaggagtttatagaagcatatgtagatggaagttatgaacattcagtaaaaatgtatggttcgggtgttgtgattttaaaaaataatgaagttataaaaacttatagtgaaaaaggaaaagagaaaactttagtaagtatgagaaatgtagctggagagatagaggcttctaaaattgcaatgcagtactgtattgacaataatgttcaaaacttgattttatactttgactatgaagggattgaaaagtggtgtactggagtttggaaaacaaataaagaaggaactatagcatataaaaatttctatgacagtattaagaataagcttaatgtaaaatttacaaaggttaaagctcattctggaaataagtataatgaggaagctgataaattagctaaaaaagctattggtgtataataaaaaaatatttatacataattacatggtataagagtatatctaaattcctactttataattaaacaacttgtaattaaacaacttgtaattaaacaacttataattaaataaattttgattaaaaaagcagattgtattatgaaaaaataagtatctaatttataaacaattaataatagtattaattagatacaacttatttaatataataaaatctgctttttatataactataaaatcttcctacattctattagaattgcccataaataccttcaagttcttcttttaatacttcagggtcatttataccaatagacatggttctagccagtatatttgcttggtcataagttgatgtccatgagaatacaccacctagacaatttctaagaacatattgagtttttaagaatattgataaagcatcatcatatgacattgcaaaatctccatccttaactaaatacggaacttgagcagtattatcaaatctatattcatatccatttttatttatataatcccttctaagctcatcataagttcttgttatagtggcacctaatcttccataaaatggtataccgagaaggattttttcagaaggcattccagcattctcaagatttctcaccattgcatcaacactatatcctggcaaagataagtctgaatcaaaaagatttgcttgatgttttctaccatttgggcctgtttcacctgctgtaaaatcataactcataagattaaaataatctattataggagctattttatctatttcagcacttgaatttatatatcctctatctcctgttccagctacactaagccatttatcatctcctataacatctcttatggcagttagtaagagtgtaaagttttctctatcttgaggtcttgatgttattccagatgcactacttccaggatattcccagtctatatctattccatctaaagcatattcatttatcatctgattgacctgtcttgcaaaattatatctagatgtaggtgttaatgctgcatcagagaatccttcagctccccaacctccaatagctacaattacttttaagctaggtttttcacctttaagagcaagtaattgatttaaaaatctaggataaggaataaacaaatttccagactggtctatctcagcaaaagcaaatataactgcatctaatagttgagcatctacattagttggatttccaagaacatattctgctacaattggatttatatctggacagtttgcattttcaactattggattgtatgggtctgttatttgtggtctaactaatttttttgaatcttttaaagttttcatagctatttttttagtatttttttcgctagtataatcgtagtttttataattatgtttatagaaatcttcataactactatcttctttgttatagctagaatttattttgtcgcaagattcatctttatcatagttaaaattcatttcatcacaagacttatctttaaacttatcttgtttggagttgtgaactttgttagtatttttagtatgttttttctcatggttgcaatcatctttaatatcagtcttgtgttcttgtttacagtcaagagctttgttcaggtagtcatgatgttcatgttcacagttacattcattttcaatgtttttagtatgttcttttttccagctacaagtattatcaattttcttgctcacttcttcatcattataattatctggtacaaaacataagtaccagtccatacatgaatatttcttattacaactgttaactctattttttaattccttatagtttttaggataaggtaaaatcactggcattccaggaaaccagtttgcaggagtaactatattatctctatcactagtctgaagtgcatctactattctaagtatttctggaatatttcttcctgtagttagtggataataaagaatcgttcttagaatttgattattatctataataaatacagagcgaacagttgatgtatcactcattggttttgatatcatgccgtataacttggcaattctcatatctctatcttctataataggaaatggaatttctacacctgtaagtaaagaaatattatacatccaagctaaatgtgaactgttactatcaacacttagaccaattagttctgtatttctttttttaaattcgtcataatatttagcaaaacataaaaattctgtagtacaaactggtgtaaaatcaccaggatgtgaaaataaaacaatccaattacccttatagtcagagagtctaataggaccatttgttgtattggctttaaaatcaggagcctttgaccctaaacttggcaaatttggcatgtaaatcacccctcaataaattatcatttattttattctattaattaatacatattagtgttactattttattaaaagttaagtaatccttatgtcaaaaaaagatatttattaaaaagatttaatattttcctaatataaatgacaatagtaattgctatttttttactaatttggtatagtaatggataaggggtagtgtcaattttagtgattatacgaggtgattggattgaaaaaaattctaagaattttagttatctccatgatgatatgttttgcaatgacttttgcattagtgttaataaattcagttatgggagtacatataggattggattattactttttgatgggaagtgtgcttacagtttgtttaacaattggaattgttttatgcaatgctagaaaaatatttgatagcaaagctatacacaagacaagaacgaaaactgtcagtactaataaaaaacaaaagagtcattctagggatataaaaagaaagatatcataatttatgtaaaggaaatatttatgtataaaataatgattgataggtaaaataaaaacacgatttaacttgtgtttttattttttttcaagaattatgatataataaccaataagaaatttagtttaccataaaatataaagattattaaatggagagggaactataatgaattttagagatttatttgagaaggctgtagattttattgatgaaaaaaggaaatctatagttgcgatttcattatcaacattaggtgtaattgctttgataatagtatttttcttaagtagtaacgagtttagtgtaggaaatgaagctaatgagttgttaaagattatagagaaaagacagtattctatagctgttgattactacacaagtatagaaaaaaagttttctgattcaaaaatggaaaggtttaataagtctgtttctaaaaaaataaataaattgctattaaatagtggtgataaatatttagatggagacataagtcaagaaagttttattggattaataaatactgtgaaagaattaaacaaaataagtatagatgtggatgacttattagctcaagctgatagagttagagaaatgtataaagaagaaaatactacttatgatattgccattaactacataagtactgtttcaatattaaatggtatgggtagtaacctagatgtatacaaacagaatatagaaacaatcaaagagtctagagatgtttatgactcagcagtaaaagaccaaaaagcatataagtattatgaagctattgaaaagtataataaagtattaaaagaagatgaaaagtattacagtatggctcaaaatgggaaagaacaatgtattgaagaaatgtatgattactatataagtagagctgaagaggcaaatacttctggagattatgaaagagcattacaatatattgagtatttaaaagaagattattcagatgatgaaaaggtacagagtttagaaaaaaaatataaaaagaatttatcattgtataccttaacatctgatgacattataaatgtaatagctaaaaaaagtggcaaagacaaggcaaatctatctataaattcacttccacaaatgataaaaaataataaatactattatgctgaagtatatgagtatgataaattaataaatgaagttttggtaagtgcaaaaactaaagatttatattcgtataaagatggtaaaaaagattacaaagtagattatggtgatggatactttagaatattagaagatggaagttatcaatttggtattacaaaagataaagctaagtttgtgttaactaatactcttgatgaaaaagaaaataagtataaaaagattgagatattagatatagagaaagcagatagatatgtaaaaagtaaaaagagtttagaagaattgtttggaaaatataaaaatatttattattatgctgtagtaaataaaggcttatttagaggcaaagaagtttatgctattaatatttacaatgaaaaaatatatgccatatcagaaaatggactaaatgaatattaattaataatattaaattaatatataattaaaaagtttttggggttttaaggcgcattatgtagtaatataataatagggatatataaataattttattgtaaggagaagtatgggatgagtaatgtgaacaaaaagctagttatagctattggagctgtagcattagtagcaataatttttataggcataatgtgcatgcaatttaaaggggagaaaatagcaaaaaacacatatgttaatggagtagatattggaaaattaactaaatcgcaagcaaaacaggaattagctaaaaaatacaaattagagaatgttgagtttaattacaatgataaaagttggaaagtaaagagcaaagatttaaatttatctactgatctggataaaacagtagaaaacgcatataatttaaatagaaagagtagtttctttggcaatctatcaaaaactatttcaacaaattttggcaaaaaaagcaacttagtagttgtgataaattatgataaaaataaattaaaagcagaaatggaaaaaatagctaaagaaatagatgtagatgtaaaagatgctacacttgatataagtggtgaaaaagtcaaggttataccagattctgatggtcttaaaatggatatttctaagagtatggagaattttgataatcaaactaaaaaaggtaactataaaaatgagttagtagtaaaagctactccagcaaaagtaaaaaaagagcaacttactaatatagatacaaatttaggtacgtattcaacaatatttaaaacttctcaaataaatagaagtataaacataaaattagcaacagataatataagtaatgtattacttatgccaggagaaactttctcatttaataaacatacagggaaaagaagtaaggaaaatggatataaaagtgcacctgtaataatggaaggtgagatggaagaagattatggtggaggagtttgtcaagtttcatctacgttatacaattctgtgttatacgcaggtttagaaattgttaatgtaaaaaatcatactataccatcaagttatgttccaaaaggaagagatgcaactgttgcagatagtggaatagatttcttatttaaaaataatctaaagcatccagtttacataaaaaattacgtttcaggaaatcaaattgtttgcaatatatatggaagtgcagaagataaacaaaatataacgatatcaacaaaattagatggcgtttcacaaactacaatgaaaagagttaatgaccctacaatgcctaaaggtaaagaaaaagtagacaaaagtggaagaaatgcatattctgtatcaacatatagaacatttaatgatgcaaatggtaaaaaaattaaaactgaaaaaatagctaattcatattatcctaagaaggaaggtattatattagttgggactatggaaccaaaaccagaggaaaaaccaaatacagacgaaaataagaataatcaaaatacaaacaatcaaaatccaaataatcaacaaaaaccagaaacaccaccaactgataataagcctaatgagacacaaccacaaccgcaagcttaaagttctcaagaataggatttatgtagagtaataaaaaatataaatctaaataggagggattactttgaatttaaataatataacgaattacgttcaaagtatttgcgagaatatttctaatgtattggatgtagatgttactttagttacaaaagatttaactaggatagcaggtacaggaatattcagaggtaaaataggagagacaatatcagagaagtcagtgtactctcttgttttaaaagatggaaaatcctatgttataaataaggaaatagaagagaactgtaataaatgtgcaaatagagaaaattgtaaagaattagctgatatatgtactcctgttaaaatgggagaacatatacttggaatcttgggtatagctgcgtttaatgaagagcaaaaagaaaagatactttcaaaagataaggagttaactgcttttgtaaggagtatgtctgatttaatatcttttaaactagatgaactttataaacaagaagttaagactatagatgaccttgagagggaagctatagaaaatgccataaagaaatatggaagtaatacagaaggtatgaaaaaagtagctgaggcattaaatataggtatagctacactctatagaaaagtaaaaaaattcaacattaaaagttaatagtattgaaaaagaggtaacctttttatgaaaagaagaggattaccttttttattatgagaatggtggaaaaatatgtatagttttgacttgacatattaaatatgttatcttaaatatatattttagagtggaggtgagtattattttagttaaagatataaaacaagacatagaaagcatgcctagaaaaattttagatatatctttgatagaagataataaaagtgatttgactttttttaatatagaagaagaagacggtgatgaaacattaaaagcattaaaacagagttatgtgactacaaattataaagaagaaactctattaaacttgcaaggagctttaaattcaaagtcagacacaacgtctaaggagttaaaattagaatcatataaaagatataacaatgcattggatttagcatataaaaattatataactagtgccattaatatggttaataaagctctggagataaatcctaaagatattgatatactaaatcttagaggtcttttaaagttattaaaatgtgattttgctaaatcatttgagagtttttatactgctttatgttatgagaataatcatatatctagaaaatatgtaaatctaatttcatctgaagattttaaaacttttttaggaagatacaatcattctataagatttataaatgaagaattaaattatgagtcaatacatattttagagaacataattgaagaagagcctgagctaatagagccatatgtaatcttatctttgttatatgataaactaggtaatgtaaaaaagagagaaggatatttagacaaacttaaagagctagataaagataatcctgtatttgaaaaaaatgaagaagaaaaagaagatacaagtaaaaaggaagaaataagaaaagtaaaaagaaagaaaagtattttaccatatattatagttggctgtgttttaataggtatggggatatatttgattcaaagcaaaaagagaatagaaaacttgaataaccaaataagtagtaaagaggaaaagttaagtgaaactgataaaaagttaggagaaacgagtaaaaaattagaaaaaacgaataaggaattaaatgaggttaaaaataaagaaccagaaagagagataactgtagctgatgaggaagatttatattatcaagctctaaatttaaagaaaaacaaagaatatgaaaaagccatagataattttaaaagtgtagtttcttctggtaaaactaaaaaatatatttctgagtcaatatatcaattagcaataacaaataaattattaggaaataaggatgaagctataaaatattacaaaaaatatataaatacttatactaaaaatgaccagtattatgatgattcatattacgagttgggtatgctttattatgataatggcgatttaaaaaatgcacaacagactttttatagtttgagaagtgaagttccagacagtatgtataacaattcaaaaataaaagaaatcttaagtgaaaaataggtttatatagttaagttttttgaaacaaccaagtatgtattttattaaattaaaataaaaataaatttaaaaagagattgtgtcaaattataactttctattttaaagaaagatatttgcttgttgataaaactacaaatatatgatttgaagcaatctctttaatttttggaggtggaaaatgaaagttttcaatcaattagtaataattttatctatctgggtaataggagagtatataagttcctttatacaaggaattatacttattcctgggagtatagttggtatgctattattatttctactactacaatttaaagttttagacttgagtagtatagaaaatgtaagtggatttttcctcgataatatggctatattttttattccagcaggtgtatcacttataaagtcattagacctaataagggaaaatgtattagtgcttttattagtcatatgtttaagtacactaatagtaatgtatactactggaattattgtggagaaaatgataaaaaagaaggaagaaggacaaaaaaatgtataatgtattacagacaccagtatttggtataatagtaacaatagtttttttcaatttaggaagatacattcaacgaaaaacaagtaatcctatatgtaaccctttattaattgcaatcgtaggaataatattgtttttaagcatatctaaaatcccttatgagaattacaagataggagctgatagtctaaatttctttttaggtcctgtcacagtagtacttgcagttccactttataaacaatttgaattatttaaaaagcatatgtttgagattattgtaggaataggttgtggtatagtgatttcttttgtatctgtattgataattggcaaaatagctaattcagatgtaagtataataaattcactaattccaaaatctataacaacaccaatgggaatatctttagcaaattctttaaatggtatagaatcaataacagttgtagccataatttttacaggtatttttggtggtatggttgcttctacagtattcaaactggggaatataaatcatccagttgctaaaggaattgctcttggaacatctgcacatgctttaggaactacaaaagcttttgaacttggagaaatagaaggagctatgagtggtgtttctattggagtttctggtacaattacagtaatactaattccaattataatgaattttatataaaaaataaaattaagacgagtaccttgaatacttaaaacaaaataaaataaaaaaaatttaaaataaaaactgaacgaaaaaaatgcaaataatgaaataaaaaaatcatgtactgaaattataaaaagaaaaatttcatttaggaattaattataaagagataattactaaacttgaatttgctaaaataaaataaattactgcgaaaatagatatttagaaaaaaatactataaatttactatattgcaagttaaataataagcagtatcatattatgctagaaaaagtttcatttaaggcataaatgagatgatttgaacgtttttaaagattagaatataaaagattgcactagacatatatgaaaaagataatataatagatgatgtaatagatgacagttcaagaaattataaaaaaaatttatttgaaatattatctattacatcaggaataatatatgtaagagtaagcttttaaaattctaaagatttagaaagattgaagggagaaagaaatgagtgaagttaagaataccctacaaaaacatccagttttaagatattcaacaatgctatttgggatgttgatgacatctataggaataaatgggttcttaagaccagcacatctgcttagtggaggtgctacaggtatagcaacatctataaactatttgacaaatataaatgtaggtttattaacatttttaatcaatattccaatatttatcttagggttcatataccttgaaaaagagttttgtatttcaagtttggtaaatatgattgtattttcattattattaggagcaactcaggaaataagtaatattatacctatacatgatatattgcttcaaagtgtatatggtggtatattatctggtttaggagtcggagttgtatttagaactaggtcttctcaaggtggtacagatataatagctgcaatactaaaaattaagaagaatatagaaatgaaagacactgctttagcaataaatggcttgatagtacttacaggaagttttttatttgggttggatttagcattatacactcttataggtctatttctaaatgcgtattcaatgagttttattaaagatgcaatgaattaccaaaaatctgttatggtaatgtcaaatgaagtcgatttaatagcagaagatataatgaagagtttagttagaggtgtaacttttttagatgcagaaggtgcatacactcatcaaaaaaagaagattatatatacaatagtttcatcaaatgagataccaaagataaaagatatagctttgaagtatgataaaaaggcctttatatctgtaaatgatgttacagaagtaaaaggaagagggtttaaagcaaaagatttatagaaaattttacaagctgggagtttataatgtaaatttgtatattatatctctcagcttatttaaatttagtatatgaaaataaaggttttatcaatgatttgtgtatcactttaaaagatatcattttaaaattaaaattgaaaaaattactcaatatgtagaaaacataaccactattaggatataataaatttaatagatttagtaaaatatctaggaataacgttggaggaatagcattatgaatttatctaaagaatatgttaatttgtatgataattatttgaaatatataaatgaagtaaacaaagagattagaagtataaagaacatgaagaaacgtgttttaaaaaagggcgattttgctccagaaaatgaagtattagaattggaaggaaaaacaatacgcgatatagatgatgtcgatacaaaaaaaccaaaaaataaaatatataaattttcaaatggggatgtgtatgtaggaaaatttttagaaggaaagatggaagggcaaggatcatatactttttttgttgatgaaggaacggctatggagtacataggagagtttaaagaagacaaaaaaaacggaaaaggaaactttgtattttcaaatggaaatgaatatataggccattttgaggaagatatgatgaacggtattggaaatatgttatataatagcaaagatgaatatattggaacttggaaaaatggaaaaaaagatggaaaaggtatttataagtggagtgatggatgtatatatgcaggtgaatttaaaggtggaaagatggaagggtatggtatttgctataatagtaaaggggaagtactttatgaaggagaatggaagaataatttgattcatggtaaaggaacttatatatgggaaaaaggtaaaaagtatataggtgaatttatgcatggtaaaaaacatggacaaggaactttttatctaaataatgaattggtttatgaagggacttggaaatttgataagccatccatcttcgacagaacattagatgaaatattttcattaagactatagctttatctattaatagataaagcttttttctaatacttactgtaaataagtatgaatgatattgattagtatacactatcaatattaactcaataaatgtgatattaaaaatttttgattgattttaagaaggagggatatattgaagagattaattgctttagtgttagtaatacttattgttttattttatagccctgaattgatagaagaaggatatgatttaaaagaaaaattttttcaaagtgaaatatggaatgaatttttagacaaaataaatataaataataattctaagaaagataaaaaagaacaaaatcaaaatttacaatcaaataatactgaaggggagaacttaggagagtcagatataaagaattttgaaaaaataagcttaggagataatttaagctatgttttatcaagtattggtaaacctggtagaattgatattagtgaatatggttttgattggtatgtatataatcaatatggaaaagaatttgcaatggtcggacttgaaaatgatgaagtagtagcactttatagtaattctattaattcatgtgaaaatcaagatataaaactaaatcaagatagacaaacagtgagaactaagattacaccattaaaatataagagaaaaggaaataccagatatataataaactcagaaaatcaatatgatataataagtaaagaaggtaagtatattacaattttctacgatattcatgaagaaaatagagtttgctcatatttaataattgataaaagtactgaagatgagtttaaaaaattatatccagatgatagagaagaacttaaaaaatgttttgaacttgaagttatagaccttgtaaatagtgttagaaatcaaagaggattaaactcattgagatacagtgaacaggcaactttgagttcaagaaaacatagtgaagatatgagagataataatttttttgaccatataaataagaagaatgaaactccatttgacagaatgaaaagagaaggtatagtatatacttcagctggagaaaacatagcagcaggacagattaatgcaatatatgcgcatgaagcttggatgaactctgaaggacatagaaaaaatattttggggaactataataatattggagttggagtaatatttggaggaagctataaaacatattacactcaaaatttttataaataactaaaatatttgaaaggaagttaaaaaatgacatcatggaaaaaaaagacagtatataagtgcttaatagcagtagtcttgttttgtggaatagtgttaatatctaattttagtaaagtttctgctttgatgatggatactaatggaaatgttttgattaaacatggttcaagggaaaaaaagctaatagcaattacctttgatgatggtcctcatcctaaagaaactagtcaagttttagatgtattaaagaaatacaatgtaaaagctactttttttatagctggaaaacatgcaaaatggtataaagaaccattagtaagagcaagtaaagaaggtcacgagataggaaatcatactttcaatcatcctgatataagtaatttaagttctagtcagatagaagaggagattgttaagtgtgaagacattttgaaagaagtaactggaaaaaaacctacattatttagaccaccatttggaagttatagagaaaaagacttaatagaaattgcaaaaaagcatgactataaagttgttttatggacaggtgtagatgtgaaagattggaaaaatccaggagctaatagcattgcagataaaataattaataaagtaaaaaatggagatataatacttttgcatgattatgcaactaatgatacagttgaagctttagatatgtttattccaaaaatgattgaaaaaggttttaaatttgtaacagtttctgagttgataaaataatttttaggggggagatttacagtatgattcttatgatagacaattatgattcttttgtatacaacctagtccaatatatagaagaattaggggaagcagttgtagtaaaaagaaataatgaaatcaaaataagtgacattgaagaactaaatccagaggtaattgtgttatctccaggaccgtgttctccaaaagaagctggtatttgcatagatattgttgagcattttaaggggaaaaaacctatactaggaatttgtttaggtcaccaaactattggatatgtttttggaggagatattataaaagcacaacagcctgtgcatggaaaagtatatagtatcaaccatactaataaaggagtttttaggggacttaaaaatcctttaaatgtcactaggtatcattcactaataattgattccaatacagttccaaaagaattagaaattacagcaattactgataaaggggaaataatggggattaggcataagaaatatttaatagaaggagtacagtttcatccagaagctattttgtcagagtatggtcatgaaatgcttgaaaattttataacagaagctagagaaagggtacatatgtaatatgataagagagataaatactaaattaaattcttttgagatatttactatttttagaaatgaacatgacagttttatattagacagtgctatggataaagaaaaattgggaagatattcttttataagtagccaaccatttaaggtattaaagtataaggatactgatgaaaatcctttagaagttttaaaagaagaactacataagtatagggttgtaaatgatactaatcttccatttgtaggaggtgctgtgggatatttatcttatgatttaggtaattacatagaaaatttacctagaactgctgtagatgatattgagatgcctgatatgtattttggattttataatcatgtaatagttatagaccatcttgtgcaaaaaacttatatagctactccaaacatagatatcgaattagaagaaaagataatagatgatatagaacaaagaatattaaaagaagagaaaaaaggtatagatagcatatgttatgaagaaaaagaagtaacacctataagacttaaatctaattttacaaaggaagaatttaaaaatgcagttcaaagtgttagagagtacataagacaaggagatatatatcaagctaatttaacacaaaggttcagtggagaaacagaacttacaagctttgaattgtatagggacttaagaagatttagcccagcaccatttggggcattcttaaactttgaagatacacatatattatcaaattctccagaaagatttataagatgtgttaataagagaatagaaactagaccaataaaaggtactcgtccaagagggaaagataaagaagaagatttaagacttcaacaagaacttagaaatagtgaaaaagatagagctgaactacttatgatagtagatttagaaagaaatgatattggcagaatatctaaaactggaagtgttaaagttccagagctatttgtaattgaaccatatgcaaatgtaaatcacttagtttccacagttgtaggtgagttaaaagatgataaagatgctactgatgtaataaaagcaacttttccaggggggtctataacaggagcacctaagattagagcaatggaaattatagacgaattagagccaacgcaaagaaatgtatatactggttcaataggttatataggttttaatggtgatatggattttaatatagcaattagaacaataatcaaaaatgacaaaaaagtctattttcaagttggaggaggaatgacttgggattctgacccagatgaagaatatcaagaaacacttgataaagctaaatccataatgaaggctttgaggggatattatgaagaataatgtaggttttgatagtagtttaagtaaatttggaattggtttgtttgaaactattagagttaaaaatggaatagcagtagatttagatatccatatagaaagaatgctaagttcaataaattgtttggatttagatataaactataaaaaagatttcttgataaatgaaattgttacatatataaaaaaagaaaatgtcattaataaagcacttagaattactgtttttgatgaaggttataatatatctattagggatattccatataatcaagagacgtatgagaaggggtttaaattagctatatcgccaatagttagggggaatagtttaattcatagacataagactactaattattttgaaaacatatataccaaaaatatcgcaaataagactggttataatgatggtatatttttaaattcagaaggtgtaatattagaatgttctatgagcaatattttctttataaaaggagaaagagtgtacactcctagtgatagattaccgatattaaatggaataataaaaaaaaggattatagagatttgtgacgaattacatatagagttgatagaaaatgaaattaatatatcagaaattagtagttttgattttgtttttgtcacaaatagtcttatgggcgctataaaggttacagaaattgacaaaataaaatttaataaagaaaatgttgtttttgataaaatagtgaagttattagaataaattaaaatattaacaatttgttggagacaaaagatgataggttgtatttatgaagtatacaatgaagagatgactaaaataatagaaaaccaaaacactttggctgtatatttagtaggttctagtaaagacgtagattttactctttatgatgtagagataaacgatattgatgtgttcgtttttgtaaaagaaggggaaaaacaagagagaatactgtttaaaaaaaagggaatagaatttgatgtaaattacttttcaaaagatggtgtaaaaaaattattatcaaatagggaatatttctttgtgaaagaaatgaaagatgctaaagtactgtttgatagggagaatatatcaaatattataaaagatataagtagagatatttacttagaaggacccagtaaaatgtcattagaggaaaagtcttttataaagcaagatattggagcaaaaatatcgaatttaaaaaataaagaaaaatttgatgtttttgaatatcattttttgacgaatttatatttaaaagatataataattgggtactttaatataaatgataaatgggtaccaaaagacaaaaaattgctaaaagttttaaaaaaagaaaataatgagctttttgaactagcgtcaaaagtaagtgaaaattatgactatcaaagacttttagatgtttataattatatttttaaagaaattgagacaaaagaggttataaaactaatcttctagtcacaaatcaatggggggagtttaaatgaataaagttgataaagaaaagatacaacatgcagtaagagaaatactagaggcaattggagaagacccagatagagaaggtctaatcgagactccaaatagagttgctaggatgtatgaagagatattctctggtcttagtgaagaaccaagagaccatttaaaagttctttttgcagatgaaaaacatgaagaattagtattggtaaaagatattccattttattcatgttgtgagcatcatctagttcctttctttggaaaagctcatattgcttatttaccaaaaggaggaagacttacagggctttctaaacttgctagagtaatagatacattggcaaaaagaccacaattacaagaaagaatcactaaaaatgctgcagatataataatggaagaattacaaccttatggtgtcttagtagtagtagaagctgaacatatgtgtatgacaatgagaggtgtaaaaaaaccaggttcaaaaactgttacatcagcagtgagaggaatatttgaaaaggacattgcgtctagagccgaggctatgagtttgattactatgaagtagcaatttattatagatataatcatttattgagatataaaatttaatttaagggagtgtcattaattgtgtttgattatggtaaaagaacttatataatgggaatattaaatgtaactccagatagtttttctgatggaggagattttaataacttggacatagcaatacaacatgcaaaagatatggttgaccaaggtgcagatataatagacttaggaggagagtctacacgcccaggtcatagctatgtagactcagacgaagagctaagaagagtaatccctgtaataaaaaaacttaaacaggaattggagataccaatatcaatagacacttataaggcagatgttgcagaagaagcattaaaattaggtgtcactatggtaaatgatgtttggggtcttagaaaagataaaaatatggcttctgtaataggaaaatatgatgcagaagtgtgtataatgcataatcaagatgggacaaactatgacaaagatataatggagtcaataaaagacttttttaaggtaagtatagaaatggcaatgagttgtggtgtaaaaaaagaaaaaatagtacttgacccaggcgtaggatttggcaaggattttgaacaaaatattgaagtattgagaagattaaatgaattaaaagatttagggtatcctattttgcttgggacatccagaaaatcagtaataggaaaagtacttccagttgagcctaaaaaaagattagaaggtacaatagctactactgttcttggtataagagatggcgtagatatagttagagtacatgatgtttatgaaaatttaatggcagctagaatgactgatgcaatatatagaaagtaggtataatataatggataaaatattacttagtaatctaggattctatggatatcatggtgttcttaaagaagaaaattttctaggtcagaaattctttgtcgacatggaactttatattgattcaagagaagcaggtcttagtgacgatataaataaatctgtaagctatgccgaggtttacaatgttgttaaagatattactgaaaataaacaatttaatcttttggaggctttagcggaaaatattgctgaagaagtcttgaataaatttatacttataaatggagttatggtcagagttagaaagcctgaggctcctgtaaatggtatttatgactattttggtgttgagataaggagaacaagagatgaataaggcttatttgggaataggtactaacatgggtgatagatttgataatttatcaagagcatgtgaacttttgaaaaatagtgattctatatataaagtaaaggaatcaagtttatatgaaacaaaaccatggggatatacagaacaagcagattttctaaatatgtgtgtagaaatagaaacagaatttgaaccttatgagttgttagaatattgtcaagaaatagagagagaactacacagagagagaatagttcattggggaccaagaactatagatgtagacatactattttttaatgatgtagcttccactgatgaaagactaacaatacctcatccgaggattcaagatagagctttcgttttgataccacttatggatttaaatgaagaacttataataaatgaaaaaacagtaaaagaacatttaaacctcctatctgctgaagaaagagaagaagtaaaggagcttgtaggttatgaaagaaaacctatttaataataattcaaagatagagataaatacaaataacaaaaagataactgtaaaaaaagataaacttataatagctggaccatgtgcaatagagagttatgagcaacttttggagactgctaaatttgtaaaaagtcagggagcaaatattttaagaggaggagcgtacaagccaagaacatcgccaaattcatttcaaggattaaaaaaagaaggtcttaaaatattaaaagcagttaaagacgaagttggtatggctgttattacagaacttatggatgtaagagatatcgacgaactgtatagtataagtgatataattcaaattggttcaagaaatatgcaaaactttactcttttaagtgaagtgggaaaacaaaataaacctgttatgttaaaaagaggaatagcatccacaattactgaatggataggtgcttctgaatatatagcaatagaaggaaatagtaacattataatgtgtgagagaggtataagaacgtacaatgattatactagaaatacattagatttagctgcggtacccattattcaaaaggaaacaggtcttcctgttgtggtagacccaagtcatgccactggagttagatatttggtaaaacctatgtcactggcatcttttgcatgtggagcagatggaataatggtagaagtacatcctgacccagaaaatgctttgtcagatggtgctcaatctctttgttttaatgaatttgaagatttaatgaaatcaattaataattattaaaagaggcaagagcctcttttttattcgtaatcattgctaaggtaaatttataagttataatttgatagttagattatttaatataaataaagatttaatattgatagaattaatataaaaaataaaaattttttgattaataagaaggatatcaataaaaaaagtcgaattgtgtatattgagtgattgacaaatttagaatatagtgtagaatagaaatgttaacacaaaaaattacaccagaaggtgataatatgaatgatataaaagacattattgaagaaataaaagctagatgcgatatagcaagtataatatctgaatatatgaatataaaacaatctggagctaattacaaagggttatgtccatttcatggtgaaaagacaccttctttttatataaatacatcaaaacagatttataagtgttttggttgtggtgaaggtggagacgtaataaattttgtcatgaaaatggaaaatttggattttatggatgctgtaaaaattttagcaaataaatgcggtatagaaattaacactaacatgaatgaagaaactaggattaaaatagaaaaatctaagaaatttcaagatatccatacggaagcagctagattttatctttcaaacttattgggaagcaaaaatcttgggtatgaatatttaagaataagaggactagatgataaaattattaagaaatttggtttaggattttctttggattcatggaattcacttatgaatactctaataagtaaaggatacaaaaaacaagacttattggattgcggtctaattgcaaaaaatagagatggaactaattgctatgataaatttagaaatagagttatgtttcctatatttgactatagaggaaacataataggatttgggggaagagtattagatgattctttgccaaaatacttaaattctccagacacattaatttttaataaaaaacagaacttatacggattaaattttgctagaaaaaatttagaaagtaaaactatagtcttagttgaaggatatatggatttaatttcgctttatcagtatggtataaaaaatgtagtagcaacccttggaacagccttgactgaacaacaaggcattttaataaagagatatgcggacactgctattatatcttatgattctgatgaagcaggaataaaagcgactttaagagctatagatatacttactaaattaggtatcaatgtaaaagtgttagacttaaaagatgctaaagacccagatgaatttgtaagaaaatacggacttagtgattataaaaaagctatggatgtttctactcactacataaaatataaaatagatcatcttaaaaaagaatttaacattcaaaaagatgaagaacgagtgaagttcgcaaaagaagcttctaaaattataaaacaattgacaagtcctgttgaaattgatttttatacaaagtatttaagcaatcaaatagatattaatgtcgagtctataaagagagaagtttatggcaaaaattacaataagccatataataacaaaaatcaaaagaaaatagaagaaaaagtaattgaaaaagtcgaagtcagacaagacggaaaacaattagttgaagaaactctaataaaaataatgttagaagacaaaaaaattagagaaatagcgttacttaaagtagaagaaagtgattttttattgaaagaaagtaaagaaattttaaattacatgattaaaaatcaagaattggacaaaataactattgacaaattgaaaagtttaaacatatccgaagaatacttaaaagaattaaattcaatttctttgaatagtataaacttagagaacacaaaagaaatagaaggaataataacaaatatcagaaaaaactcattagaagagcaaattaatagcttgttgagagaacaacaagaattagaaaataataatgatatgaaagaggtagatggtagagttatggaaattgctttaaaaatagttgagataaataaaattttaaagagcttgtagagaaaggaggtttgagtgtggaaaataaatcgaataaaaaagagttaaaaaaggttactgctaagacattaatagaaaaaggaaaaaagcaaggttctctgacacttgcagagataatggaagctttttcggagactgaacttgataaggatcaagtagaaaatctttatgagactttaggaaatttgggaatagaaataacagaaacaaaaaattataaagctgatatagatttttcggttgctgatgacgatttaagtataggccacttagatgaagatgcagaggcaatttcacatgatgactcttctgcaatagaaatagaaactgtggatttatctttaccaaaagggataagtatagatgaccctgtaagaatgtacttaaaagaaataggaaaaattcctctacttaaaccacatgaagaagtagaatttgctagaaggatgcacgaaggtgatgagatagcaaaacaaaggttagttgaagcaaacttaagactagttgtaagtatagcaaaaagatatgtaggaagaggtatgcttttcttggatttaatacaagagggaaatttaggtcttataaaagcagtcgaaaaatttgactatacaaaaggatataagtttagtacttatgcaacatggtggataagacaagctataacacgtgctattgcagaccaagctagaactataagaataccagttcatatggtagagactataaataagctaataagagtatcaagacaactacttcaagaacttggaagagatccaaaaccagaagaaattgcaaaagaaatggaaatgacagaagataaagtaagagaaataatgaaaatagctcaagaccctgtgtctttagaaacaccaataggagaagaagaagatagccatttaggtgattttattccagatgatgatgctccagccccagcagaggcagcagcatattctttattaaaagaacaaatagaagatgtacttggttcgttaaatgatagagaacaaaaagtattaaagcttagatttggtcttgaggatggtagagccagaactcttgaggaagttggaaaagagtttgatgtaactagagagagaataagacagatagaagcaaaagcactaagaaaactaagacatccaagtagatcaaaaaaacttagagattatttagactaaaaagatacatcattgatgtttttgtgataaatgccatgagataagtgatatctcatggctattttgtagtaaagatttaattttatttttgtagttatttcagtctaatatctataacttggattaaatcctataaataaagggaattgaaaggagaattatatttgaaattaacagatagattattgaaaatagcatcattagtgtcagatggtaaaaaaatagctgatatagggacggaccacggatacataccagtatatttgttaaaagagggaaaagtaccatttgcagtgctagcagatgttaataaaggacctcttgacaatgcacataaagaagtcatacagaacaatcttttagataaagttgatttacgattgggttctggtatagagatacttgaaataggggaagtagaagaagtgataattgctggtatgggtggaatcttgataagtgagcttctcgaggctaaaaaagaagtagcacataatgtagaaaaattaatattacagccaatgcaagcacaagaagaacttagatattaccttttaaacaacggatatgaaattttagaagaagttttagtgagagaagattttagaatatatgagataattgttgccaaatatacaggtaaaaatactataatagaagatgagatatattatgaggttggaataaagcttttagaaaacaaagattctctttttaatgattttatagaaaaaaagataaagacatatagttctatagttaataaattagaagggaaaaatggggaagctatagataagaagagaaaggaaagcgaagttgcaataaaaaaacttgaaaatttaataaaataaataggaggtatatatgctattaaagagtctaactagaaaaattgaaaaaaagtatcctctaaacttagcagaggattgggataatgtaggtcttatagttggagattttgatatggatgtaaaaaaggtattggtatctttagaagctaatgaagatgttattgatgaagctatatccaaaaatatagatttaattgtgacacatcatccttttatatttgggaaaattaataaaattaatagtggagatttaaaaggcagacttatccaaaaacttattaaaaatgatatatcactttattctatgcatacgaattttgatatagcatttgatggtctaaatgactattttatggaaattatggaatttggtaattcaaaggttttagatataactaaaagcgaaaatttgtataaattagcagtatacgttccacataactattcagatgaacttagaaaggttttaagtaattcaggagcaggtcatatagggaattatagtgattgtacgttttcaatagaaggtgaaggacaatttaagccattagaaggctctaatccgtttcttggaagtgtaaatgatatagaaactgtaaatgaagttaaaattgaaactgtagtaccacagaagcttttaggtggggtaataagttctatgttagatgcacatccttatgaagaagttgcatatgatttgtacaagttagaaaataaaggtgagatatttggactaggtagaataagtaaacttgataaaagtatgacattagaaagtctttcaaggaaaataaaagagaaattaaatatgaaacacataagagtagttggaaaccttagtacagacataacgaaagtagccgttgtaacaggagctggttcagaatttgtaaaaaaagctaagagacaaggtgcagaagtactaattacgggtgatgtaaagtatcatgaggcacaagatgcacttgatattggaatgtgtatagtggattgtggtcattttgatacagaagatatattcaaaaatgttatgaagagatttttagatgaatttagtgaaattgaagtaataaagagtaatgtatatttgaatccatttagtactatttagaagtgtttgattaaaaaatactatataaaaaataaatttgagtttaattagggggataatgatgaaagtagcagtaatttttcatagtgtttgtgggagtacatatttattagctagagaatataaagaagtgcttgaagaaatgaatatcgaggtagatatatttagagtaagtgacgaagttgcaaaaacacttcctcaatattatttgataaattacaaagaatacaaagacgaatttgaaagtataaatgtaattaaatctggaaaagaaatattagattatgatgctatatttatgggttcaccaacatattatggaaatgtatctggaccaatgaagatgtttatggatagtttttctgatatttgggtaggtgctcctttgagtggtaaaatatttggttgttttgctacagcaggttcacaacatggaggaggagaattagctttgcaagctatgaatatatttgctcaacatatgggaatgactcttttgtcagttccatgttcagtaagaggaggttatccagcgtatggaatacttcatatagcaggagataattctgatataagaccaaatgatgatgccaagataggtataagagattacctaaaaagacttaacatataagaatatcatataaaaatacctaaaagtagctgtatatacttttaggtatttttacttaattataaacgtgaagctttaccagaaatatggtcaatttctattttaacaacagttgttaagttcatatccttctctatgtacttcatgccttcttcaaagaatcctttagaatatttttttattatttctacaagagcatttttcttttcttcattttctacagtgcaagcttttccaaaaactatagcactagaataagtagtactaaatttatctggaataacactttcattagcaactactaaaaaagaaactttgttgtttttcgatatattatctaacttatgtccatttcttgcacaatgaaagtaaatagaatcattaaagtatacataatttacagcaactccataaggataaccattttcagatatagtggaaaaagtaccaaattcaccattttttaatacttcaacagtatcttcttttgtcatttctctttttttcaatctcatttctttaaacataatatcatcctttctaattttgatgcttaaattaaattttagaacatttataaagattatgctatgttttttacaaattttaagaaaaaaatatagtttaagataaaaggtagtgaaagagaagctatttggaggtttatttatgatattattgttagagtagtacaaacaatactaataaatttaatagctggtttcttgttatttaaggtagtaagcatgtctataagaaggggaagttatcgagggtagaagttgttatttataacgatattataaagaaaatattattatataaaataataaatagtaaagaggtatcaagttgaatataatacttaatacctcttcaaaattaaattataaaagtgttgtgggaattgtcctatacatggtaaggagataataaagaatgtatctttaaagtctcaactaaacagcaaaatttatccaacaaacatacaataaatgcttctttgtatctaggtggcttaacagtaagtggccacatgtgttttaaaattatgtccgtttctttttcatttatttgaaaaaataaagttgcattttttaatgcttctctagggtgagtaaatccatgtaatccttttctatcacctttgtaatgccaatcataaagaaaaaagtcgtgtagtaaagctcctctaataacactttgaatatcaacacgtaagtgcaattttttacataatagataactataatatgctactgacaaactatgttcaagacatgaaacattgccatgatgaggaaatgttctcataagttgaactttttcagaagaaagtatctcagaagcacattcattaaaatatttgatttcagcttttgacaacattatgaaaatctccattcttagtaatatataaatactatacttcaacgataatatgaaatatttcttatcctacaaaatataatacccaataatacaagtaagataccttttatggtattttaaagtaagagagattttattaggctaaacaatgaaaaaattaaaagtaaagctatagcaatatatagtatttttccaagaggattgccaaaatttatagtccatccaataccaaaccttttattaaccattaatgatgggtcatttggattattatacatgatgcctgctatccaatacttctcatcttcttctggagaataagatgagttgaattttaaatttggggaattaatatatgttgctattaaataaattataactaaaagcgttgtaatattcatagcagttgatagttttgtttttattgataaaagagtagtaaaaaactgtgttgtcattataatcatcaatattaaaaacaaataaccaattttatttaaatatttaatgttttcaactctactttcttcaattctatttgtatctatcttaatccttgactttatggatccaatggaagttatatataataaaaccattaaacaaaagtcagtaccgattaatttaaatacattaagaaatgatttatctataaaaacatcaggagacccatttatgttccaatgagtggcaattgagtctggcaatttattataattaaatgctataaaaatactcatccccaaagtaaatagtatcggtattaaatagattattttaaatttttttattattttatttttcttatttataaaatccatatctactattaattttgaatctacatctatatgacctaatttagaataaatttctgatttaagcttcttagcttttttatgtgtatgaatatatagtatactctcatataataaaaaacctataataccaataaaatatgaaagttccaatttattaaatgtaaaaaccagaataaaaactaatataaagtctataataaaacctaaagataatagttttttaaattctttatctaattttataaagtaattataatttttatgctcttggtctatagaaactccatagatgtgttttttacctacaaaatagggcataaaataaaatgtagcatacatcaaaattagaactggaaatattgtaaatagacattcaatcttactcataatatttcacctcatacttgtcaaataaacttgaacttagtgacaaaaattcttctttactaatacctgataaataagattttgccaccaataattccaagtcaagtttatttttttgacgagttgtattatctattttcattggtagttgagctacaatagcaccttttcttctatcaatatttaagaatccctcttcttttaactcattgtaggatttgttcactgtatgtaaatttacaccaatattttctgccatacttcttacagatggaagtgattcatttattttcaattctcctgaagctatagccttagttatttcttctttaatttgtacataaatagatttatcactattaaaatctaaatttaaaaccataaaaaacctccattatgctttataaatgaaaacgattgttatatacatagtataacataaaaaataataacaaacacaaaatataagtttatattttgtaaaaattgtaatttaaaaaataacataatttttattaaaataatacagatactatttatagatagaaataaaaattagaaaggagaaaaaatatgttaacatatttaatgaaaagacaaatgcataaaaaagatgatggaatgagtaaaccaatgatgattacaggagctgtaattacaggtgtaggagcatatgctgtatacaaaatggtaaaaagccataaatctaattctcaaatggtcaatacaaattattatggaaatagcgattatgatgattataaatatgacgaatttgattatgactgtgattgtagagacacaaaacaagattatgaatatgaagaattaaaaaaaaaagtaaaagaatttaattcaagaagaataaattgtgaaaattgtccacatgtttctcaagaagaaatgatgcaatatgtaaatagtgttaaagatgtaaaggaagatattgatttacatgaagatgctaaaaaagataatatttacaaagaagatgaatacaaaaaatatgaagaagaataagtaatattttgtataactgaacaaatagtaatgtcaaattatttaatatctagttttaatatgtaagttgtaacttaacttgaaagaatcagtatcattctttagatagttaagttacaacttacattttgtttttataaattttaatagttctttgtgactattttgtaattttagaaatattttagtatccagggtaattgtgtataataaaacttgtatagatagatagtatgaaattaagcagatagtttaaaattaaaatgaaaagaaaggaaatagttatgttaaagttgttgatagttgaagatgatagtactatatcttttggaataaagtatgctttagaacaagaaggatttagtatagatatatcaaaggatttatctagtggaaaagaaatgatttcttctaatgaatatagcatgatactgttggatgttacattgccagatggaactggttatgagctttgtaaatatataagaggattctctcaggttcctataatattcttgactgcttgtgatgaagaagtaaatattgtaatgggtctcgatataggtggagatgattatataacaaaaccttttagaattagagaattaatatccagaataaaagctgttttaagaagaaaaggtaatacttcagaagaaaataagaaaatacttaaatttggagatttaagtatatatacattagaagctagagtatataaaaatgataaagaaatatttctgacatcagttgaatataaacttcttttaattcttatacagaataaaaatactgttttaagtagaactcaaatattggaaaaactttgggatgtaacttatgattttgtaaacgacaatactctaactgtttatataaaaaggcttagagaaaaaataggtgatgatttatgtgaaccaatctacatagaaactgtaagggggattggttataaatggataggaagtgaaaatagtgtttctatataatccagaagtgaagaagtttttaagtaagtatgttactttgatgtttattgttatcataatatctattggatttagcataatcaacgtgtctttaactaaagagatggttgtaagaaataatcaagctataatagggactttatcgagtaagtatccaaacttagaaagtcagatagtagacataataactcaagggaagtctatgaagaacatagattatggtcagaaaatattaagtaagtataattatgataaatctattaagataaactctgagcctattatttctaaattagttttagagactatcaaaataaatataatattagtatgtataatatttattttgatatttgtgttggttgttagatattttacgtcaatttacaatgatttatcagatatgactaagtatgtttactatagttcagagggtaagccatttgatatgaaaaacaagaatcaagaagggcagataggtcttctaaaaactgaactcttaaagatgacgacaattcttaatgaaaaggttgaacttttaaaaagagaaaagatatttttaaacaatacaatttccgatatatcacatcaattaaaaactcctatgacttctttaataatgttgaatgatttattatataatgatgtaccatacgaagtaaaaatcgattttttaaataagataaaaaatcaattaaatagaatggattggttgattaaaagcatgcttaaattatcaaaggtagaagcaaaagtgataaattttaaaaaagataaggtaaaatttagtgaactcatacatagagcaatgctatctatgaaaatacctatggagattaaaaatcaaaaactgactatagagggaaatgataatgtatcttatattggtgatattgattggtctgtggaagcactagtgaatataatcaaaaattgtgtagaacatactcctgaatttggaaatataattataacctataaagaaaatccattattttctgaactaataataaaagatgagggtgaaggtatagataaaaaagatataccacatgtatttaaacgattctatagaggaagaagtagttcaaaagaagatagtgtaggaataggtcttgcaatgtcaaaatctataatagaaagccaaaatggcgatatatatgtaaacagcgaaaaaggtaagggtacagaatttcatataatatttcataaaatgtatgatagtgactaatctgtaatatttaattcactttatagtaatagccaaaacctaatatatgaagtatagaatataaatattggaggtagttatggaaattttaagagtagaaaatctaactaaaagttatggtaaaaatgaaacaaaagttgatgctataaaaaatgtaagtttatcagttgaaaaaggaacgtttatagcaataacaggtccaagtggaagtggtaaaagtaccttattacatttattaggaggagttgacagaccaactagtggtaaggtttatataaatgatgttgatatatataatttaaaaactaaggatttggcgatatttagaagaagaaatataggtcttatatatcaattttacaacttaattccagtcttaaatgtgaaggaaaacatattgcttccagcagagcttgacaatagagatattgatagagaatattttgatgatttaatgaaaacattaggtctaattgatagagaaaagcaccttccaaaccaattatcaggaggtcaacaacagagaacctctataggacgtgcattaattaatagaccttctataatattagcagatgagccaacaggtaatttagatagtaaaaattcaaaggaaatattagaattgttaaaattgtcagtaaaaaaatacaatcagacactaataatgataactcatgacaaaaatatggcacttcaagctgatagaattataagcatagaagatggaatcataaaaagtgatgaggtgatgtagatgaatttatatacatcactaaccattagatacttaaaacaaaataaaagaagaaccattgtaaccataatcggtataatactttcaacagctttaatttgtggtataggaaatatatttgaaagttttatggattatcaaatgagagaaactataaagaatgatggaagtttccatgttacattttatgatgtaaatagaaaaaatgtggaatatgtaacgaaatcagctgaaatagaaaaacatgcatttaccaaacaacttggatattctaaattagaaaatagtgaaaatgctatattaagtataaagcaatatgatcaaaatgcaataaacggatataaagtttctataaaagaaggtagatttccagctaaggaaggagaaattgttttaagtgaaagtattattaatcttatagatgataagttaaaaataggagataagataactttaaaagtaggggatatgtttgactcaagcaagaaaaagattgatagtatgacatttcatgaaggtgattatatagcaaatgaaaaagatagaacttttaaagttgttggtataattaaaaaacctgggtttgaacgttataatggaattgcaacagctatagcctactttaatcctatgaataattacaatgatacaattaatgtatcagtagcagtaagaaatcctaaagatgtgtataagataagtaataaaataagtaaaaatatatattcaaataaagataaagaagcagtttctgatatgataaaatacaatgaacatttattgaggttacaaggtgctagtaagtattcaaatataaatagctctataaagtctataattatagcagtaactattttagtaatcatatgtacaattgctacagtgtacaattcctttagtatttctataaatgaacgaaaaaaacagtttgggatattaaattctataggtgctacatctagtcaaattaaaagattagtttttatagaaggtattataattagtttaattggtataccaataggactaatatctggaacagtagctatagacctattgtttaaaattataaataagtattttactgaatcggttgttactaagatgagtttgcagatagtgtataatccaataataattattgttagtataataatagttttgcttacaatctttatatcaattctactacctgcaatatcggcttctaatatttctccccttaatgtgattaaaaatactggagagtataaagtgggcaaaatcaaaagctcaagacttattaaaatgatttttaaaactgaaggagtacttgcatataaaaatattaggagaaatagaaaaaaatttataataactcttttttctttaatggtaagtataataatatttatatcttttagtggctttacattacttttactaagaggtgaagaaattagaaattctcaaagaaaatatgatttgtatttaactgcaaagaacacagctaggtctgtagaggatactataagtgaactagaagatattgatgggataaaaaactttgaattggcaacaggacaatatgtgtctataagagtaagtgaaaataaaataaataaatccaaggaagatttaatcaggaaatattatcaaaaatataagattggagaaagttatgaatatgatttcagtaataatgaattgatttttccgggagattttgcagtaaaaaacaaaataaataacttagtacagggctcttttaataaagagagagcaattgaagaaaatggtgttatattagttagaaaaagtgcaattgaagaaaatgggaagaaaggtgtagtagaacttaccaactataaagtaggagatacagtaaattgtgaatatcttgatgaaaatgccttaagtaaaaaagtaaaggtcaagattcttgctataactgatgaagaacgtctaggttttggttatcaaaatatggggttacaatttataacttatgatgaagttgctaaaaatttaaatttaaaattaagtaaaagccttatatttattgattcaggaggaagcattaagactaagaaggaaatagaagctttggcaaataaaaatgattttaacttttatgatgaaatttcaagcagtgaaagtgaaaaacaagatttaaaggttattaaaatatttgtatatggttttatagtagtgatatctttagtgagtgttacaaatattctaaatacagtaagtacaagtataaatctaagaaaaagagaacttgcagtaatacaatctataggggttactcctaaaggatttaggaaaatgatatatttagaaagttttatatatggtatactgtcattgttgtttggaataccaattagtattggtataattctaattatgaataaacttatttcaggtgtaattgaattttctccgattataccgtggacagccatagttatctgtatagtaagtgtttttataataacttttatagcagggtatataccaatgagtaaattaaataaagaaaatataatagataatataagaagagaaagtatatagatataaaaataattcttaactatataaaatattattaaaatcatttaagtggtataaaatattattatatcacttaaatgattttttatttatataagaaatctaataataaattactagaggtatttaactatttagaaagaattggtattatataaagtaagagaatatataataagaaagaatatttgattttatttgaaaacaaaagaaaaagaaggtgattactatttctcatataactgcgaagaatatgtataaaagtttagaggaaagaataaacaagtttccacaaggtgctccaccatctgatacattatacaaaatactaaatgtactatatacagaacaagaggcgaagttagttgctcagcttccaataaagcctttcagagtaaaaacagcagctaaaatttggagtgtaagtgaaagtgaagcatatagagtattggataaacttgctagtaaggctctgatactagatatagaagataataaagggaagaaatatataatgcctcctccaatggctggtttttttgagtttgccatgatgagaacgagacacgatatagaccaaaaacttttggcagaactttactatcaatatatgaatgtagaagaagattttatcaaagatttattttattcaacagaaacgaagcttggaagagtatacgttcaagaggaagttttaactaatgataatgaggttagtattttagattatgaaagggctactcatataattgatgaatcaactcatataggtataagtatgtgttactgtagacatagaatgcaacatgttggaaaagcttgtgatgctcccatggatatatgtatgacgtttgacaatgtagcaaattctttaataaataataaatttgcaagacgtgtggataaaatagaatgtaaagaactacttcatcaagcatatgaacataacttagttcaatgtggagaaaatgttaggaaaggggttacgtttatatgtaattgctgtggatgttgctgtgaagcaatggtagcagctaaaagatttggaaatcttcatccagtacagacaacaagttttataccaaatataaaccatgaaaattgtgtaaagtgtggtaaatgtataactgcatgtccaatagatgcgataagcaaggttaaggaagatggtaaagaatatataaaaattgatgaggatagatgtttaggttgtggagtttgtgttagaaattgccataaaaatagcattatgttattaaagagagatgaaaaaataataactccagcaaattcagtacatagagcagttctcatggcaattgaaaaagggcagttacaaaatttaatttttgataataatgctctggctagtcatagagctatgggagctatactgtcagctatattaaagcttgaaccagctaaaaagattttagccagtaaacaattaaagtcagtatatttagataaattgttaagtatgaatgataaatagaaactaacttaaaaaaggcaaagttttagacttatctatatcttaataaacttatcatttaatatttaaatttaatttttacacatataaaacttataacttaaataaaaaaaggctatattcaattaatattacttgaatacagccttttttagttatgttaagctatttcttttatttgcttaaatgagttttcatttccatttccaccaatttgtgttacagatttaaatctcatagttttaaatagttctttttgattataatctagtgagtttcctactagcattacaggagatttagtttttccagccaaaactccaacagataatccgtctattaaatcatcttgtttattcattccatttttagcaacatataaattgtctatcttagaatccttgtaaaattcttttattacttttgcattagtttcatttctagtgttacctgatattctctgtggattttgaagtttactttctatatttttagaaactgtatattctccaccgattacataagatttatcaatctttttgtttttaaataagttatttatttcagttatattactattttcattagtaagtattataggcatatcattttgagctgatacagctccaatgcttactgcatcggctaatcctttttcgccattaactactgaaatctttgatatattgctaatattgttcaattctttagcaatgttcatagaagtttgatatctatcacttcctgaaattctagatacagagatattgtttgattttatagtatctaaagatttttcatttatagaagcctctccaccaactacatatacatttttaacttttaatctctttaattcagccaaagttttttcatttatttgagagcttccagtcaataatataggagcgtttttcttgtatgcaaatggtgttgcggccaaagcatctgcaattgctgaatcgtttattaaaactgcattttcagcattttcccaacctgcttgacttatcttaatagaagtttcatatctatcagttcctgtaagtgcacttgcatttacttcatcttgatatgtaacctcaaatctagcatttggacttcctaagaaaacaattacgcctccttttggcaatctaactctattgttctttgtaactaaagaatagtttacaggaacacctttatcatcataaacagcaaaagctgaattttgaggaagattaacttctatttttttatttgcgatatcgtcaccaatcttataccattttgcataaccattggattctagttcacaagtaaaagatttttctgctggcaaattagttatagaatcttcactaacatacgttagtgttccaaaagataaatactctgtaccattttctttatgaagtttaatgtcggataaatcacgacctattacaccaggtatttctataaaagcatttgagttattctcatccattattttagtgttaactatataacctggagtttcatcagaaagactaaaacttgcttttacagagccaaacatatagctttgagaagtatatttttcatccactagatagtaacctttgccacttctttttttccacacttctttgacactatttgatatattgttgtcatctactttttgagctacatagtataaacttgctgtctgacctaatccagggacatcatcataagagctcatatttaaatatgtgatattatttttttcttttacaaattttaaacaactgttacccttttcagatacaaatctatcttgacctatgtatacgtatttatcttcaggtccattttctatataaggagaagatactgttaaagtaccattatcattaacatctacttttatcatatttgaagaagcataaagaccactattttcttttagagagctaggcattttaacttgttgtggcttactaaatgttttatcaggttttatttctttaattttacctttttcttttaatgcagatagtaagatttcttgtccaattatttcgttaagttgactacttccaccagaagaaagaactgcaactgccatattttcatctggaagaactataagattactgtggaataataaagagtctccaccttttgtaagagcttttaaattatactgattaaatggataagtgttgacacaatcccaccctaaaccatatccaagtatagaatcttctccttcaggccatagaccatttaaatattctttgttttccatagcttttactgaagcaggagaaagaataccatttgaatttttcataaatgtttgtgcaaatgtacatagattttctgcacttgaatataaaccacctgcacctatagcattaaggttatcttgtggaactgcatcttcccaataaggtacatatgcttttgctagttttgaactatcaaaactattttctgtagtttttgtattttgtaagttaagtggattatttatgtatttatcaagaaaattagtaaatgacataccagatactctttctactaaaatttcagctaaagtaaatccatcattacaataaacggaaaaagctcctggtttagcttttaatctttgtttttgtaattcttttaagaaattatcatgaccataagaatcattgtctgctaataaaatagtgtttttaaaactacttcccatcaaccctgatgaatgatttaataacattcttggagtgatttccttgtatctatcatcagccattttaaattcaggtatatactttacaacaggagtatctaaatttaattttccatcatcaaccaacttcataacagctgttgtagtaaacattttactgatagatgcgatactatacatattatccttatttaagtttttgttatcctgtttgctgtaaactccaccattaccagaaatctcaattttgccattatcaatcaaagcatattgagcacttacagcaccatactttgatagcaaagtttggattttctctttagcaagagctttagtttttgtgtaagattccgcgtttttactataatcatgtaattctatatcagaactttgatatttttcggaattatcttttgtattatcagcaaaagtaatatttggagcagcagtaaataacatactcaatactaatgtactagataataatttagagatcctttgcttaaacatattacattacctctttccctttttaataatttataattagcataacattcttaattattttaatcaacagattattatcaataaaaaaagcttttataagtatagctttttatataacagagaaaaatataaaaataatatttgttgttgtataaagaataaagggtataggtaatatataaataaaatggaggaattttagacatatgtataagaatataaataagaagcaacttaaagaaatgatgaaaaatgaaaaggatgttttattattagatgtaagaactaaagatgaatttaaggaatataaaatagaaaatgctataaatatatctttacaagatttaatcaataatatagatgaaatttacgattataaagataagaaagtagtagtttattgcagaagtggtcatagaagtgttactgcatgtaatttgttagctgaagaaggttttgagcatttatataatttaaattcaggaataattgattatatgagttaaataaggtaagttatacattaaatactatgtatagctctgtttattaagtaggaatatatctaaatatttataagataaatttaggaaagaacgaattttttcgcttttttctatgacagtttttgtagtaaatattagtttttaagttggaaaaaggtagtagctttttagctactaccttttaatatgaacttagaatattattaaaaaaatatatttaaagacagaattaattttttaatgaccagttaaattactatcgccaaatttatcattaaatggttttataactctatttataggtccttttagaagtacgtttaaacaaatagacagaatcataaatagtaatagaactagtatatctttagttagatttggagcatatataccaccaactgcttcccttgtagcacctattgcataggtaaatggcattatagggtttattctttggaagaatgtaggtgtaacttgtatagggaatgtaccaccagaagaaccaatctgaacgactaatagtactattgcaattgcttttcctacatttccaaatacagaaactaaagaatacactataaagttaaataccatactagtaaacataagcagaactatcaataaaattggatgttttgctgttactcctaacaataatatatctccagttcctattataaaaccttggacaagagctatacttaaaaaagtaagacctcttccaaagtaaatttcataaggtttatagtttccatgtacagatgtagacaatagtgctgaaataagtaatataccaacccatgtagaaagaacactataaaatggtgtcattgcagaaccataattttcaattggatataatttctctgttttcacctcaacaggttcttttaagaaattagactttgtcaatatatcactttcaagcaagctgactaattttttcatatcttcaccattactaattttgcttaaagtatcaatcaaatcatccaacattccttttgctaaaggaagtctttctcttatcaatgatatactttcctgtgcatttcctgaaagttttagagaagtagtaagtatttcttcaacctttggaagttttgcttctgccttatctaaaacagtaattatatcatttgctacttttatactgtttgcaaatatactatttataggttttgatatttttgagtcaaaattatttaaaatatttaaattaattcttccaataccatttgatagacttaaaacattattcaaagcacttatagatggttgttgtccagatataactttgtttttaatatcatttaatgttgatatagatgaatctattttattgctagagtcttcaagattatctattacatcatccaatctattatttgatgtaagttggtttaatttagttaaaaagtccaccaaagtatcgtttaaagattgcaaattagaaagtttttctgataaattatctatcaacttaggtacatcttcactgccactatttactgcatcaattaaatttaatgtaagagaagaagcagaagatgaaaggtcaaccattaaatttaagtcagacttaataagaggagaaagttcgtctaaattatcatttgtatcctctaagaatttttttaagtcacttgataatagttttgtatcattcagagtctttttaattgtaggtaaatcagatttaatatctttaactgtatcagataattttgaagtagcatcagaagctaaatccacagtcttatttatatggtcaaatctcttttgaaggtcaataagggaattttcaacttttgtcaattttggaagactgtgttcaattcctgcaccaactccgtttgatataccaagaacgatttcactaactgtttttactatagtctgattaacctgtagttgtattgtagaagcacctttatctgtaatctttggtgcaactgcatttattttttcattaacagtatagataatttcgccttttttaacatcatctgtaattaaagatgtcaaatcttttgtaaaattttttggaatcttaagtgatgcataataagtaccttttttaacaccttcaagagcagttttttcatctacaaactgccaacctaaactcttgttatctttgagttgttcaattaattggtctcctacattaatcttttgtcctgctatttcatttcctttatcttcatttgttactgctacaagcatattagcagtgcttccataagggtcccaagatgcctttatattgaaccaagcatacagagatggtaaaaaagcaagacctaaaactattacaagtacggcataattgccacgtatatcttttaggtcacttttaaaaatttctaatatattttttaaaccctttgaaggtcttaaattcttgatattattccagtttaaaatttcttttaaactattagtttttttcaaatgtctcacctcctaaaatattttgataaagaaaaaagttagatttataatcaattttaaattatattactttttacacaaatagtaaagttaaaattttgtcttaattttaatacatatatattatatataatagtatgctataaatatatataaatataggaaataaaaacaaataatttataaaatatatggtataaaaattaataataaatcaaatatttataattgatataatcaattaaattagccattatgatatacttttggtaatgagaaaattctatgaagggatgattgaatgaagtattttaaaaaatacataaaaaaatatatagtattatttctaacagcagtattttttttaacattggaagctttttgtgatttagctcaaccaactataatggcaaaaataatagatataggggtttcaaataagaacctagactacatactatcaacaggagctataatgataggtataacttttttaggtgcaatatttgcaataataagaagtgtaatctcggcaagagtttctcagcatttttcttatgatttaagacaggatgtatttgaaaagataaatacatactcattaaaacaaatagataaatttggtagagcttcgttaataacaagaattactaatgatatcaatcaaatgcaacaattcgttaatggaatgatgagagtttttataaagtcaccaataatgtgtataggaagtttaattatagctataaaattaaatttaaagatgtcaataattattctaattgcagttttaattatatttattataatattgcttaatatgaagatagggtatagattatttaaaaatgtacaagaaagtacagataaagtaaattcaaaattaagacagtttttaagtggaataaaagtagttaaactattttgtagatacgattatgagaaccaaagctttgaagagttaaatgatgaactttttaaaaatagtagaaaagctacaactatgatgtcattttttagaccgacaattacaataatcattaatgtttccataataataatattactgattggaaggcatttaatttattcaggagaaattaaaattgggattatagttgcttatgtaaactatatgactagaatattaacatctcttataatgatttcacatgtttttaatgtttttgttagggcaaaagcatcttatgagagaataagtgaggttttggttgatgagaatgaagaagtaattgagagagaagaaagtttagatgttggagaaaaagatttaaagtttgtaaattgtgatataatttttgaaaatgtagatttttcgtataacaaaaatacagatgaaaaaatattaaaaaacgtatcctttaaaatagaagaaggtcaaaatattggtgtgattggtcaaactggttcaggaaagacttctttagtaaatttaattcaaaaattatatataattgataaaggtgatattaagattggaggacgtagtatatacagtatttctgaagaaagtttaagggaaaaaataggtgtagtatttcaaaatagcagtgtgtttggaaaaagtatactagaaaatatagttatgggaaatgagggtataagtagagaagatgttataaaatcatgtgagatagcaaatgcaaatcaatttataactaaactcgaaaattcttatgatgaggttttatttcaaaggggtaaaaatttatcaggaggacagagacaaagaattactatagctagagctatagccaaaaaaccacaaatattaattcttgatgattgttttagtgcaatggatattaatacagagacaattataagaaagaatataaaagagtatataagtaatttaagagaaaaggaaagtaagaaatgtactgtaataactatttcacaaaagattagttctataattgactgtgataagattttagtcttggatgagggtgaggtggttggatttgctacacatgaagatttactggttagttctccaatttataaaaaaatttttgcgttgcagaatttagtaagtgaagatgtaaattaaggaggaagtatattgaacttaagtactggaaatcaaaaggtcagtagattaaagaaaaaagaaaagcctaaagattttaaaaaaacgtttaaaagaatttttatgtactttaaaaaagataagaagattactagatttatttttttgctagtaataattgattcaattatatcaactgtaataccatatactattggaaaggtagttgacataatagatatcgatacttattcaaaatccattttcttaaaaggaataattattttactttcattttatataattgagttttcagttaaactgtctaaggggatatgtacagctagattatctcaaagtatagttaaagaaatgagaagtaatttatttttaaaatttaaaaatctaccaataaccttttttgataaaagttctactggagatattatgagtagagtgacaaatgatgttgataatatcagtacaggaatatcaaattcattagtacagttaattacaggaatcttaaacatattgatgacttttattatgatgtttgtattaagcccaattttaacattttgcagtgtaatattaataccgatagtaatgtttgtgagtaattttattgcaaagagaactagagttttttttaagcaacaacaagttgagttgggaaaactaaatgcacatattgaagaaatgatatcaaacataaatgtagtaaaatcttttaattatgaaagaaaatctgtaaatgattttaaagaagtcaatgatagacttctaaatatttcccttaaatcgcaaatttacacttctcttttaatgcctattatgaatgtgattagtaatataggatttgcaactatatgtattataggaggtgttcttgcatctaaagatattataaccataggggttatagctagttttttaagttatgtaagacaattcacaagacctttaaatgaattagcaaatctatttaatacattactttcagccatagctggatgtgaaagagtttttgaaattatagatgaacaagaagagcaagaagtgcataacatgtttaaaagtgagattaacgataataaagatggtaatttaaactctcattttgtaaagggagaaattgagcttaaagatgtaagtttttcttatgattcaaaaaagaaaattttagataatataaacctaaaaatcaaagctggcacatcaaatgccatcataggagagacaggaagtggaaaaacaacgattataaatctaattacaaatttttatcatatagatgaaggaagtatatttttagatggtaaggatatatactctattaacagaaactatttgagaacttgttttggagtagttccacaagaaggttatatattcaatgatacagttatggaaaatataaggtatggaaatctggaggctactgatgaagaagttatatatgctagtaaaatagcaaatgcacataaatttatagttaaaatgcgtgaaggatatagtactgtattatcggataggggtgaagatttaagtgaaggtcaaaaacaattaataagtattgctagagcagtattaaaaaatgctccaatacttattttggatgaggctacaagtaacatagatatagcaacagaagctaaaattcaagaagcaataaataatttaacttatggaaagacaagtataattatagctcatagattaagtaccatatcaaattgtgataatataatagttttagaaaatggtagaattgtggaatcaggaaatcataaagaattgataaaattaaagggacattattatagaaacatattattgacacagggaaaataagtatttagaaaaaacttttaaaaaaattgtttaaaggtatatggtgcgggtatatatagactaacttaataaataaaaaatttaatttgatatataaaatttaggaggaaagtaattatgaagaaatttgtttgtacagtatgtggatatatacatgaaggagatgctgcaccagcacaatgtccagtatgtaaagttggagctgataaatttgaagaaatgaaaggcgaaaaaaattgggctgatgagcacagaataggagtagctcaaggtgtagatgaagaaataatcgaaggattaagagctaactttgttggtgagtgtacagaagtaggaatgtatttagcaatgagtagacaagctgatagagaaggttatccagaagtaggagaagcttataagagaatagctcttgaagaagctgaacatgctgctaaatttgcagaacttcttggagaagttgtagttgcagatacaaaagaaaacttaagagttagagttgatgctgagtatggtgcaactgatggaaaattaaaattagctaaaaaagctaaagaattaggactagatgctatacacgatacagtacatgaaatgtgtaaagatgaagctagacatggtaaagcattcttaggattattaaatagatattttggaaaataaatttaatataagttaagtagatttttaggagtatatcatttatgatttttaaaattataatgatatgctcctttttaatagttgtattttatattttttatagctataatcttgtaaatatttaaatcattataaatatagttttaatgaaattaattttttagttttattatctctgatttatgtaataaatagaattaatttgatttaaacatatatttatgataaaatatgagaaataaataagaatttaattagaaaggagtatttatagtgtttaaaactgtatttgaagataaagaatatgttttattatgtaagaattattctaaaagtgatggagtaaaagcaatatttatttatttgatatctatgttactattgtttttccaaggttatttgtatacaacaaatttaagttcaacaattttaactaactcacaaatgatattgtcaatcttgattttacttatagggctgggatttgtactactttcgaaggaaaaactaaatacgattgggattacaatgtgaaatttaaataaaagtcttttgtatggagttattggtgctactgtactcgtaattttcgttattttaacagctggaattatgcaaggaaaaaaagttgattttcaattacctactgtttttatgattgttacatttattgtttctgctatttcagaagaaattgtttttagagggtatattcaaacaaggttaactggattaataaaaaatagtgtactttcatcttgtattaatgcttttctttttctatctacacattaccctgtaaaatggatttcaagtggagatttttcatttgcaattctatctggattttatgtgatatgccttatattacttaacttttcatgtgatttagtatatcgaaaaactaactgtctgtggggggcatggctactgcatatcttgtataacattggcacaggagtgctgatttttactacttagtcaattttactttgcagaaagtttatcgtaagaaacggattattttataagtcaaattttagagctagtaaattgacatacttaaaataatttaaactagatgtaaaaaatatcgacaggtggtggacaatctgattaagtatatacataaaagtaatatagctattgttgtactgcatgaaatttatggagttaataattttataaaagatgtttgtcaaaagtattataaaggtgggtatgatgtgttttgtccagaactcttaggagaaaaaagagttttttcatacttaaaagctcaagaagcatatgatttttttataaataatgttaagtttgatatttataaaaaagtagaaaaacttataaatggtttaaaatcggagtataaacatgtatttgtagttgggtatagtataggtgcaactattgcatggagatgtagtgaaaactctttgtgtgatggtataatttgttgttatggctcccgaattagagattatatggatgtaattccaacatgtcctattttgctagtgtttgcaaaatacgattcattcgatgttgattatgtttcttctcaactttctagaaggcaaaatattcaaattgaaattttagacgcaaatcatggttttattgatacatactcaaaaaactattctaatgctcaaacagaagtttttaatattaaagaaaaaaactttctatctaaatgtttaggctaatatgttttattataaaatatagaaaatttaatcaatttgaaaaacataatgacactactaatgttaaaaaatattagtagtgtcattatattttttgagatagagatagtcagtagaatcatagaattaattatgtttttatgattgtattagattaatatttaaattacattgaaaagaaaaaaatcattactatagaataatatctttatcaaaagaacattcttatgcagaatatggttatgagtatctaagagaaatctcaaaatatataggatagcagtatgaatttttatagattttattaatacaataaatcaaatgagaaaaaaaatcaaaagaatacaataatcacttgcaaaaaatatgctattgtgatagacttaaatcaaaattaggaattgtaagaataaggaaaaagataagtaattattttaacgagtcaaaatttaagaaattgtgatttatatataagatagaggttgtttgtaaatttaaattggttgaagaggaggaatattatatgatgccattgatattatcaaatacaggtgaagaagtagttataaagaaaatttcgggaagtgataagacgaggacttttttaaatagtataggttttgtagtaggtacaaatgttaaaatagtttctaagatagatggtaacttaataatagacgtaaaagatactagagttgcattagataaaaaaatggcaagtagaataataatatagggaggtaatgacatgaacagactgaaggatattaagtgtggagagactgtaaaagtcaaaaagttagaaggagaaggagctacacgaagacgtataatggatatggggattacaagaggtgttaatatatttataagaaaagtagctcctcttggtgatccaattgaggtaacagtcagagattatgaactatcaattcgtaagtcagatgcagaaaaaattattgtggaataataaagattaattagagtagggttaatgtaattatataatgagaatgattttctgtatcacaaacagtgatgtatttaaataataatggagggaatggaaatgtcaataaaaataggtctcataggaaatcctaactgtggtaagacaacaatgttcaatgggcttacaggctcgtcgcaatatgttggtaactggccaggagtaacagttgaaaaaaaaggtggaaaattaaaaggaaataaagatgtggaaatagtagatttaccaggtatttattctttatctccatatacattagaagaagtagttacacgtaattttatgctagatgataagccggatgcagtaataaatattgtagacgcatcaaatatagagagaaatttatatcttacaactcaagttttagagctaggtataccgaccattatagctcttaatatgatggatattgtaaataagaatggtgataagataaatattaaagaactatctgaagttataggttgcccagtggtagaagtaacagcagttaaaggtcaaggaattatggaggctgctgaaaaggcagttgaacttgcaagtagtaacaataaattaaatttcaaattaccttttgttgatgaaagtaaggacgcaatagaaaaaattgaaaaaataatagaagaaaagactccatatatagatgtagaaacacgctggttagctataaagctatttgagagagatgaaaatgttatacaaaaacttgatatttctaaaacaatattgaatagtattgaagaaataactagaaattgtgaagatgaattggatgatgatagtgaaagtataataacagccaatcgttatgaatttattagttcaataatttcaagtataataaagaagaatcgaaaaggtaaggaaactgtatcagataagatagataagattgtaacaaatcgtatactagcattacctatttttgcacttataatgtggggagtttactatatagcagtaagttcattgggtactatagcaactgattggacaaatgatgtactgtttggagaaattattcaaggcaatgtaagtaattttctagcttctttaaatgtagcagagtggttacaaggacttgtagttgatggtctaattggtggagttggagcagtactaggatttgtaccacaaatcatgcttttattcttattattgtcaatattagaagattgtgggtatatgtcacgtgtagcttttataatggatagaattttccgtaagtttggtctttcaggaaaatcatttataccaatgcttataagttcaggttgtggagttccaggagttatgtcaactcgtactatagagaatgatagagatagaaaaatgactattatgttaactacattcattccatgtggagctaagattccaataatagcattatttgcaggggcattatttggaggtgcttcatgggtagctccatcaatgtatttcttaggtattgcaatgataatcatttgtggaattatattaaagaaaactagtttatttgcaggagaaccatctccatttgttatggaattacctcaatatcatgttccaagtgcaaaaggtgttttaatacatatgtgggatagaggaaaagcatttataatcaaagcaggaacaattatatttgttgcttgtggagtaatctggttcttacaatcatttaattggtcattacaaatggtagatgctggagatagtatattagctagcttaggaaatatagttgcaccaatatttgctcctcttggatttggaaattggcaatcatcagtagcaacagttacaggtctagtagctaaggaaaatgtagttggaacatttggagttttatttggtatatcagatgcaacagagcaagacccaacacttcttgcttcagttgcaagtatgtttacagtagctagtgcgtttgcatttatggcatttaatatgctttgtgcaccttgttttgcagctattggagccataaaaagagaaatgggttcatggaaatggacatggattacattaggattccaaactttaacagcgtatataattgctcttcttataaatcaagttggaagtttagttttaggtactggaggaagtattgctggggcaataatatctatatttatagcagtagcagtagtctttgtagttttaacttattcaaataaaaatatgaaaaaagaaaaaatgggtaaattaagttatatgaaaaattaattcatataaataaggagtgatgaatatggctacatttattatagcagctattgtagtagtattaatggcactagctgtaatgtatatggttaaaaattcaaaaaagaatggtagcagttgtggatgtggttgttctggatgctcaagtagtaagagttgtcatagcgctaagagataaataggataagagcctgataaaaagttaaattgctttattatcaggttcttattttttatataaataacaaatttcatatttgaagtaggttagactatgctgtaattttactgtataattatatataaatatatgattaggagggattattgctaaattaagcaatataagtgaatattatgtttaaatttgatgttacaaacgagcttatgtgtatagcaaggggaagtggtaaattttttgcaaaaaaaggtgctatggtagcctttaaaggaaattttaattttgaaaaattgctgttaggtccaagtaatggcggtggattgggaagagcattattaggtcatgttcagaggtcattgacaggagaacaaatgccaataatggtggttgaaggtgaaggtgaaatttacctagctcaaaatgcttaccatgtagatgtaatatcaattgacccaggtgattccatttatgttgagagtgaaaacttattggcattttctgaacaattaaattacagtgtaaaattgattggttcaggggtaatatctcaaaaaggtctttttactacacatttagtaaataaaacaggtcaaaatcaagatgttgctataataacagatggtaatcctctaattcttgaaggaccttgttgtgttgacccagatgcattagtagcttggactggaagagaaccatatcctaaagtatcaaaactatcatggaagacttttattggtcagacttcaggagaatcttatcatatggaatttgttgaacctggacaaatagtcattatacaaccatctgaaagattgtctggcttaaaaacagattctacaccttctgatagaatgagttcaggtggattaagacttggcatagattaaatcttatgatatagcttaattattatttaagatattaaaaaataaaaagggtagcagggatagatatgttaaaaggagttttatatgtttgagaaaattcataaaaggtttaaaggatattatatttttttaataattttaattttatggaagatagtatgtgttttgggtatatggagtagctatattctgcctcctcctgaaatagtcttagatacttttataaaaatgatatatgacggttctattttcttaaatgtttatgccagtgtaagaaggatattaataggttttttaataagttcattgatggctataccacttggagttgtatttggagtaaataaaaaaatgtatgaatatttcaaaccactatttgaatttatgcgaagtacacctccactagctttggtgccaatgcttattttatggtttggtataggtgaagaatctaaaattataattattattttggcatccttttttccaatatttttaaatacattgaaaggtataaaaaattgtgacaataaattaatagaagtaggtaaatcttttaatttatctaaaaagagaattttttataaaataataatccctaattctatgctggatattgttgttggacttagtttagggcttgggtatagttttagggctataattggagcagagcttattgcagcttcttcaggactaggatatttgatttctgatggaaaagatatgtctagaactgatgttgtattggtaggaatttttgttattggatttttaggtatactttcagattatctattttcaaagataataacaaaatttagcaaagggaagcaggttgatttaaatggttagaagtggatttttgctagagaatatatataagaaatatttagttgataataaagagcatttagttcttgataatatatctttaaatatatctagtgaagagataactgttatattaggtgaaagtggatgtgggaaaacaacgctacttagaattttagcagggcttgaaaatgctactagtggaaacatatatttttttaataatgataaaaagtgtactccaaaagtaggaatggtatttcaagaaagtagacttatgccatggctgaatgtaagtgaaaatatacttttacatactgaaaaagataatagaaataaagttgatttagacaagtatttaaaaatgatgaagcttgaaaagtttaaaaactcatatccaaatgaattatcaggaggaatggctcacagagtaagtatagcaagagcactttccttcaatcccgatattttgctgatggacgaaccatttgcagcgctagattacttcacaagaagaaaaatgcaaaaagaagttgtaaatatccataaaaatactaaaaaaggtgtagtatttgtaactcacaatattgaagaagctatggaaatagcaaagaaaataattgtttttagtaaaaataaaaggattaaacaatttagtgtcgaagatgaatataatagagatttaactaaaaactattatataaacttgaaaaaagaaatattaagggaattgggggagttttaattgattaaaagaaacaaaaagattttagcagtaatgacatctttaataatggtgttggttgggactgtaggatgttcaacaacaaatgataagaaagatgaacctgcaaaaaaagaggctagtttacctaaggaaataaatttaacttatgtaaaatcaccacttaatgttcctagtatattagaaaaaaaggatgatttatttggaaaggaatttaaaaaggacaatataaaagtcaacttccatgaattgacaacaggaccagagcaaactcaagcattagcagcaggtgagctagactttttacatgcattaggaggaacgtctgcaataatagctgcatcaaatggtgttggtcttaaaattacgaatatttatagccgttcaccaaaaggatatatgcttataactaataatgataatattaaatctataaaagacttaaaaggtaaaaaaattgtaggtccaaaagggactatacttcatcaactgttgattgctgcacttgctaaagaaggctatactatagatgatgttgaatatgtaaatatggatattcctagtgctgcttctgcattagaaagtaaaagtgctgatgtagcaatgcttgcaggtccagtggcattgaaaacgataaattcaggtgccaaaatgattgtaaatggagaaggattagtaagtggaataatagttactgctgtaagtgatgactttgctgaaaaatatcctgaattagtaaaaagatttatgaaggttcatgaagaaactttaaaatatatgaatgaaaacaaggatgaagtgatggatgttgtatctaaagaagttggtttatctttagatgaaacaaaagaaatgtattcttggtatgactttagttctaaaataacggacaaggatataaaagaattagaagatacacaggaatttttgatgtctaatggaatgcaacaaaagaaaataaatattaaagatatgttgtacaatcaaaattagaatactttaaaatattaaagtggaaaatacacccttatttattatggaaactgtatggtaaaagagggtgtatttttattattatacaaaaatacaattaaaaacaacttactattttatctacacttatgtagtctagtaattttctcattttcttacggtgaagtaaaaactttgaatatgtgtcctcggattgttttgtgtcaccataaactttccaatatttaatcatagaaacttcataattactatatcccataaatccaatcacatctttaagaggatatcctaaaaaaatacctatttcatcaggaaaaacatcactcttaagtttatttactaaatgctctaaataagcattaacattcgtattttgtttgtatcctaaaaactttaaaaagtttactgtttttttacattttaatttttctgataatgcttttttatttacaaataagatttttaatccctttttttctttatcaataactataaaatctattttcttacatttatatagatatttataaatatcattaattttttcctctctatttacatcagtaaacgaaatatttattatttcagcaggtttagagcctaaaaagactggacctaaaacctctaaaagccattttatatatgatgattcaattttatttttacaacaaaattgtgaattacaacaagacataaaagataacctccttcaaatgaaaattaatatcaagtaattagattatactatgaatgataatcaatatcaataataaaattataatttttttatttaattatttattcattatgatttccaaaaaaataaattataacttgtttaattttagtaaataaaaaataaaaatatagaaatactaaattaagaaagaaaattattaaaattttttgtagtacaaaacatctaggagggtaataaaaatgaaattaaaaagaactttatttgtaggattagcattagtattagctataggaataactgcatgtgctagggataatgaaaaaccaaatgaaaatgcaggaaaaaatcctaatgaatctgtaaataataatgaaggatatatgaattattattcaacaagttataatgattatatagcaggtctaaatagatattctatttatgatactccagaaagtataaacaatcagtttaaagataaagaatatccaggaaatgaaaaatatctaagtgatgtaaaggctgcatataaagatagtagagataaaatacaatcatttgtaacatctcttaaaaaagacggtaaaacagaagatacagagttaaagagaatgaatgatgacctaatagctgaaggggaaagattagtaaaagatatagatgagagaatagaaaaattagataaggtatctgatgaagatatgaaaaaaggtcaaaatgattttatgaaactagttcatggaactgaagatgttggaaacgatattggtagtggttttagaaaaatgataaaagatatgaatgatagattgggaataacaggaaataataaaaaataatagagtaaatagttttaaagttagaaataaatatttgaaatatagcgaagccttgtaattaatatattttttggcttcgcttttttgtatgttatcaagatactaatttttatcttgtaacctcatattttcattatagtttatttagaggttatttttttatgtttttacttgttttttctctttttaaatttttgttttgcaaaattgtaagattcttctattaaagttttaaagttctcaaatgtcttttcagtagggcttaggacgcatatccatcccatccatgagtagataggatgtggcatgattgtgtccaattttgtaaaatcaaaatccatatcaactatttgccctacacctggacgctttggaatatatccaaacatttcaataaaagtttctttttttaatcctatattcacacggtatacatttggacgactaaccaacgaacctttatcatgattactgtctttttctttaatggtaagaacatatacccctcgctttaaaacaccattaggattgtagtaaattgctcgttccccccaactatccattagtacaacatcatctaagtttgatagacaataattgagaatatcatcagccttaatagtatcattttccataaaatatcaatcccttctttctttaatattattattgctttagatgcaagaatatcttatcatataatggtgacaattattgtcactatatttaaattaggagtatgaatatgtcaagagctgagcgtttaattgaactgatgataacaataaatgcaaaaagaagttttacagcgggagagctagcagaagaattttctgtatcaaaacgtactatactaagagatttacaggtattggaaagtgttggatttccactatattcaaaagttggagcggctggaggatatcatgtacttaaagaacgtatacttccaccaattacattttcagagagtgaggtaaaatctatattctttgcatatcagtcactagagtattataatgatttaccatttgagcaagaaactatttctgttttaaagaaatttttaaattgtataccaaatgatattcaatataatattgagaatatgagacgtaaacttgttttttggacaccagataggcattgctcaacaccattattgaaggaattgtttaatatagtaatgaatgaatttacaattaaaattgaatattcatcaaagcaaaaaaatagtatacgtaccattgttcctattggtttgtatgctatgaatggactttggtattgtccagcttactgtataaaatcagaatctgttaaggaatttcgtgcagacagaattgtgaagattttgagtatagaaaacttatcaaataagaaatataaggttttatcttctatacatgattatcttaagaatatggaagtaggtacagattatcatattaaaattaatctgacagatgagggagtaaaacgttgtgaaacagaatttttgttggcaagaggattgaaaattttgtctaagggtggatacatagatatgtatataccaaaatctacacttaattgggtggctgaatattttttaacttttggaaaaaatgctacaataatagaacctatagaacttaaacatttgattaaaaaatagctacgcacacttgtgactttagtcatgagttagtagctaaattagtcagcatatagggaaacttatatgtagagataggataacacctatccaatactacttgaattgctaaaaacccctaaagctaaccaaactaaaacataaggatgaaataaacctaagtgtgaaagttacgaaagtagaaaaaattggttagatggtataaggttaaatcctaagtactttaaaatgggcaatcagcaggtaagctccgaataggagaaacttcaacgactattcctcttgagggaagtacactacaagttatcggtagtggaagtgggtagaccttagcggataatgccgaaggataagatatagtctgtgcttgcatgaaagtgtaagaagttcataagagaactgcataggtactagcgaacttatgtgaacgacaacctcaaaaatgataaaagttaagacttacggttcttatatatgttatttaaaaataaatataaaaaaccttcaaaatacttgttttaagtaattgaatattttaatattatgataggtgatgaaaaatggaagttactcatggtagaggatatgcatatagtatgtcaaatatagaaataatcagaaaaaacaagtaaagtgaggtgatagtagtggaaaaagcttataagtttagaatgtatccaaataaaaaacagcaagagttaattaacaaaacttttggatgttgtagatttgtatataataagtatcttgctaaaagaatagaagtttataaaaacaataaagaaacttttacttataaacagtgtagttctgatttgaccaacttaaaaaaagaattaaagtggcttaaagaacctgacaaattttcactacaaaacgccttaagagatttagataatgcatataaaaaattctttaaagaaaaagtaggatttcctaaatttaaatcaaagaaaattaatagattttcatataaaactaactttacaaatggaaacattatgtattgtggtcaacatataaaactacctaaacttggtatggttaagataagggataaacaagtacctaaagggagaatacttaatgctactatatctaaagaaccaagtggtagatattatgtatcattatgctgtactgatgtagatattgaagtatttgaaaatactaataatcagataggtttagatttaggaattaaagaattttgtatctcaagttgtggagaatttatagaaaatcctaagtatattaagaagtcattaaacaaacttgctaaattacaaagagaattatcgagaaagacaatcggtagtttaaatagaaataaagcaagattaaaagttgcaagacttcaagaacatatagctaatcaaagaaatgattttctacaaaaactatctactaaattaataaaagagaacgatattatttgcatagaagatttacaagtaaagaatatgattaaaaatcgtagactatctcgcttaatttctgatgtatcatggtcagaatttgttcgtcaattagaatacaaggctaattggtatggtagaaaaattgtaaaggtaggtaaattctttgcaagttcacaaatatgcaataaatgtgggtataaaaacgaggaagtgaaggacttaaatataagagaatggatttgtcctagttgtaatgaaactcacaatagagatataaatgcaagtataaatatattaaaagaaggattaagactaataacaattcaaaataaataacttatgtaagaaccgtaggaactacggggatagcctgtggagaattagtaagacatattttagtatgcaaaattctatgaagcaggaaccctgtgactttagtcatgggaggttcagaaagtctaaagtattagagctatataatcatcattgtatttaaattattttatttaatagtaggatagagtttggataaaatgttaattttcttaatttactttacagatgatttagatagattgatgttatttaatttatttcttataatgatgttctatagttatatagacattaaaatataaagtgttaggagctagaaaactaattaaaaatagttaattaacgataataaaaaataaaaaatttaaataaatttattgacaaatactattaatgaatatatcatatataacatagcaacaaatgataatagaattgaattaaataacgtcttatcaagagtggtggagggactggccctttgaaacccggcaaccagtatattttatatacattggtgctaaatcctgcaactaatatagttgatagatgagtataaatagctttctaagcctgagtttatactcgggcttttattttgttgtaatacataagagaggataaacataaaaactgagcagaatatatgggaggaaattttatgattagcataaaaaatgttaataagtattatggaaagattcaagtgcttaaagatgtaagtattgaaatagaatctggagaaatttttggaataataggtcatagtggtgcagggaaatcaacactactgagatgtataaacggattagaagaataccaagaaggcagtgtacttgtttctgataaagaagtaaagtcattgaatgaaaagcaaatgagagatttaagaaaagagttaggaatgatttttcaacacttttcattgcttgaaagaaaaactgtatttgataatgtagcattgccattagaatgttttggatactcaaaggcagaaattaaaaaaagagttttagagttattagaagtagttggaatatctgaaaagaaaaatgataaacccagaaatctaagtggcggacaaaaacaaagggttgcaattgctagagctttagcactaaacccacaagtacttctttgtgatgaagcaacttcagcattagacccaaatactacaaagtcaattctttcattgcttgaagatataaataaaaaattgggaataacaataatagttgtaactcatcaaatggaagttataaagcagatttgtggaagagtagcaataatggaaaatggagaagtattagaggtaggagatacagaagaaatattcttaagaaatactaaaggacttagaaaattaataggtgaagaaagtataatattgccaaaaggaacaaatataaagatactattccctaaagatatttctaatgaagctattattacgactatggcaagagaactaaatatagatgtgtctataatatttgggaaattagaacaatttaaagatgatattttaggttcacttattataaacatttcagataaaagtggagagcacgtaaaacaatatctaactagtaagggcataagatgggaggaaatgataaatgaatagtttaattgactttttaacaacactatttccaaatgcattgttacaaactttgtatatggttatagtaccaactatagtggcaacaatattaggatttatattagcaatcatattagtagttacaaaaccagatggattaaaaccaaatagcacaataaatagtgcattaggatttatagtaaatatatttagaagtttcccatttatgatacttatagttgcaatgattccaataactagattaatcgttggaacaagtataggggaaactgctgcaatagtgccaataactattggggcagcaccgtttatcgctagaattatagaaagctcattaaatgaagttgataaaggattgatagaagcagcaaaatcttttggagctacaaaaagacaaatagtatttaaagttatgataaaggaagctatgccttcaatagtatctggaattacattatcaataatatctatacttggttatacagctatggcaggtgcagtaggagctggaggattaggtaatatagcacttatttatggatatcaaagatttgatacagcagtaatggtatatactgtaatagcacttataatattagttcagataatccagggagtaggaaatctggcttataagaaactaaaataaattaattataaacattttaaagagggggagtaaaaatgaaattaaagaaattattatcagtagcattggtgtcagcaatagcaatatcagcagtaggttgttcaaacaaagaggataaaaaaatactagtaggagcttcatcaaatccacatgcaaagatattggaagttgcaaaacctttgttaaaagaaaaaggatatgatttagaagtaaaaatatttgatgattatgtacttccaaatacagctttagatgaagggtctttggatgctaacttctttcaacatattccatttttagaggaaactgtgaaggagaaaggatataaacttacttatacatctaaagttcatatagagccaatgggattctattcagaaaaagttaagtcattagatgaattaaaagatggagctgttatagctgtgccaaatgatgcaactaatggagctagagcacttaaattattagcaaaaaataaattgatagaagtaaaagatggagagcttataactaaaaaagatataactaaaaatcctaaaaatatagtaataaaagaaatgaatgcagagcaattaccaacagtattaaaagatgttgacggagcagtaataaattctaattatgctttaacagctaacttaaatcctactaaggatgcaatagtaatagaatcaagtgattctccatatgtaaatataatagcttgtagagaaaataataaagatagtgataagattaaggctttatcagaggctatgaatagtaaagaagttaaaaaatttatacaagatgaatataaaggaagtatagttccagctttttaaactgaatatacaaaatctacaaaatgagtaaaattaaaaatatttactcatttttttttataactagaaagtgacaaattttttggaagaattgtggtaacatatttataggtaaaactatataaaaatgaagaagtggtggggaatatggaatctaaaggaactttaagtaagaataaggtctatatactagctaatgggttatttttggttattgcacttttaaatataaatttgtatacagtttctataaatatgtatagaataattttactttggatatttggatattctatagtttatataagtagctttaaaacagatgaatttataaatatattgaaagtagggtgtcttgtattagtttttgtaagtattttaggagtagtaaatttaaaaattcaaaaattccaaattgtattgcttaacttaagcataattaatatgtctacttttatatacttaaccatttctaaagtaaaaaaactaagaataagcccaatactaattttttatagtgcttttgtgatattagattactttataagaaatatttttagtgatattaactggaatatgattattatattaattaatatttgtatatctatgtttaatttactatatttgttgaataaacttgatagtaacattgagcactataagttaataaaagatttaacatattttgttttttttacaactattatatgttttgtagcaatttctaagattaatatagtagattcagatagattaataggagtaatatatttactattatgtaaccatacttattatgtatatgtatacagtcttaataatagagtagtgtatccatattatgaacttgattcaatcaataaaaaattaagtaaaaagtcagagcaattaggaaagataaatttagcaatagaaaaggatatgattatacaaagaacattaaaaaactacatagaccagagaaaagaattacttagacaagctctggatacaataccaaatgtatggatagtaacagactatgattttaatataagttacacaaataataaatttaaagatgaattttcaaaggatatgaataattattataaaatattaacttttataaaggaagatgaaaaagttgctgaaaaattgaagaaatttgataacgatataagtataattgataaactggtagagttaaatgataaaatttatttgttaagtttaagtaataataaagatgaaagcaattacttaataagtttaaatgatattacaaatgaaatcaaaatagatgaagaaataagaaatataaataaagactatgaaaacattatactaaatattccatctcctatacttgtaagaagtgctgaaggtggcataaagaagaataaggtaataagtataaataaaaaatatgaaaagagttttaaatgtgtttcaagtgatttagtcgatatgacattagaacaatattttgaaacttttaacatagatttctttgacaataggaaatttaaaagattaaatctaacacaagaaaagaaagctgaaatagtaagttacaatgacacagcaaactgtatagttaattttgtgatgtctgactcagaaggtgaagaacatgttgaagaagttagagttggagactattggtcagataataaactctttaaattgcttacatttagagatataactaaagagataaatattcttagaacagtaaatgaacaaaaaataatatatgaaaaattacttgatgttataccagaggctatttttcttgaggatttaagtacatcaagagtactatatacaaatagagcctttagagagttgttcggaatttctagtgatgtattaggagttacaacacaaaaatatagaaatatattagtaaaaaaatacataaacaatttaaatataggagaaagagagaagagtatccatatagtaaatgaaaataatcacattaaagaagtaaaaatgatatcaagaacattatactttggacagaaaagaagtagagtgagaattattaaagatttaagtgtgcaaagagagtctgaaagacttaaaaaagcattaataaaacaaagacagtatgaccaaatgaagatggagttttatgctaatatatctcatgaacttaagacacctttaaataatatatatagttcagttcaacttattgaaaacctttataaaaaaggaaaaataattgattttcaggatatactaaaagaacatataaaaataactaaacaaaatatgtttagattattgagattaatagataatataataaatatttctcaagttaagtcagacatatataagattaaagcagttaattttgatattattgacataacagaaagaatagttacatctattagtagttatgctaagtctaaaggaatagatttaatttttgatacggatgaagaaactgttatggtagggcttgacccagaatctatagaaagaataatactaaatatattatcaaatgctataaaatttactttagaaggaggagaaatccttgtaggtatatataaaaaagacgaaacagtagagataattataaaagatactggagtgggcatagacaaagaaaaattaaatgatatatttaatcgatttaaacaaattgaaaacagtggtatatcaaatgaatttggaagtggtataggtttatgccttacaaaatcattgattgaaattcaaaatgggaagatttacatagatagtaaggtaggagaaggaactaatgtaaaagttatattcccaattaaagaggttgttgaagaagtatatgataattcaaattacaatgataatattgaaaagtttgagatagaattttttgatatatataaataataaatggctaaatttattgtttatatatatcacattaataagagttaattttatttattactttagttgtatttgatgcgttttaaataaattttatgaggtgaaattttggaaaaggatttttttagaaaaaatggaattgatttagccaaatcaatattaggtaaatatctaataaggaaatatgaaaataaagtaattgttaccaaaatcatagagacagaagcatacatgggtgtaaatgataaaggagcacatgtatatggcaataaaaagacagatagaactaagccattatatttagatggtggacatatatatgtttatttaatttatggtatgtataattgcttaaatttatctgcaaatatagaaaatgtgccagagtgtgtattaataagaggggtagagcctataacttctttagatgagatatctatgaatagatacaacaaagcttacactgagttgagtaaatatcaagtaaaaaatattactaacggaccaggaaaactttgcaaagctttaaaaatagatagaagtctaaatagtaagagtataatgggtgaagaattatatataagtgatttttattatgatgataaaggaaaaaaagtatttagtaaagatgagttagatataaaaactagtaaacgtataaatatagattatgcagaagaagcaaaagattttttatggcgtttttatatagaataagtttttatataggtaagatatgtatctataggaaggtattttataggtatgtatcttatttttttatagaatttttagtttgataaaaataactttatagaattacaaacatatttaataaatttataattattttaatgatataaagaaagatatattttggcgaaatgagctataaaaattaatttttttgtgtattttattaaaaattataaaatttgtatagataattagtttattttataagtaataaattaattattaaagaatgaagaaattttgacaaaaaaagaaattatatttagaatatagatatatttacaagaatcttattgagatgatattattttttatcataagcaattcttgttaaatgagaaattagaaaataaaatataaatctacataaaatacttcaataactcttgacaatctaaaaaatgacaaggctgtatataaaaaatatatatagtattaaactctaaaataaaatatgttgtagagtaaaaaaagacattgaatagatatcattaaattgtaaaattatgttataattgtactaaaggatgtaataatgtgtagaaataataatataatttgaaattttaataattaaaccagaagaagactacatgaacaacttaagttttattatataaagagtaaatgcttataaaaaatgtatctttagttggcaagattaaatatacatatgtgaaaaataaatcgtaaataatcgtaaaaatgtagacaaaaaaagattgataaattatagtaatacttataaaaattttttttaaatgaaataaagataggttcagtacctatatttatatttttgtatttatattatgaaaaaattaaaattatttaggggtgatggttttgaataaggacataggagcaaaaataaagcaactcagaactcaaaagcaaatgacgctgaaggatatgagtgaaaaaacaaacttgtcaattggttttttatcacaacttgaaagaggattaacaagtgtggcaacagattccttaggaaaaatagcaagtgtactagatgtagaattaacttacttttttatgaagccaaaagagcataaaagagctgtattaagaagttatgaaaaagaagtatttgatgtagaaaactcaacatttatacattatcatttatcatctagtttaaaggaaaaaacaatgctaccaagattaattgaaattcttccaagtaagagtagtgaggaaatttgttgttacgtacatgaaggtgaggaatttgtgtatgtattagagggtactcttacagtgtttttgggagatgaacaaatagaaatgtatccaggagacacaatacactataatagtgaaaagaacaatcataattgggtcaactatactaataaggtagtgaaaattttggtagtaagtataccaaatccatttgaaaagtctgatgcagttaaagaagcttaaattttaacgattactattagtcaataaggaggtactaaagtgaaaaaaattggattcataggtgcaggaaatatggcaagcgctatgatagggggaatagtaaattcaaaattagttgaacctaatatggttatagcatcagcatatagtcaaggaactctcgatagaatagatgcaaattttggaataaatactacaaaagactcgaaggaagtaactagaacctctgatatagtaattgtagctgttaaaccagatatatatgatgatattttggaagagataaaagactttatagatgacaataaaattatagttacaatagcagcaggaaaatctataaaggatatagagtcaattataggagaagataaaaaaatagttagaactatgccaaatactccagctcttgtaaatgaagccatgtcttctctttctataaataaaaatataaacaatgaagacttagaagcagttacagaagtatttaattcttttggaaatactgaggtagtaccagagtatcttatagaagctgtaattggtgcaagtggttctgcaccagcatatgtatttttatttatagaagctatagcagatgcagcagtaattgcaggaatgccaagaccacaagcatataagtttgcatcacaggctgttatgggttctgcaaaaatggtacttgagacaggaaaacatcctggtgaattaaaagatatggtatgttcacctggtggaactactatagaagcagttaaagtacttgaagaagaaggttttagagcttctgtgataaaagcaatatgtgcatgtatagaaaaatctaaaaaaatgagtgagtaataaaaatttattgtaaataaagagaattgccttttatagaaaatttccattttaggcaattctttttatttgtttaatttctaaaataagcctgaaagccaattttttattttttcaaagaaaccaactgagtcattattatttgattgattttctgaattatttgttgtgttgttttcatttgtttgagaactatcgttattttcattattacttgaagtatcattttttgagctatttgtatcactatcattgttagaattagtattattttgtggatttatttgaacaccttctgtagaatttattacagcatcagagccaagagactcatcattagtgttatttaagattcccaaatcttttttatctccgcctgagaataaaccagagaaccagtctcctattccactaaaccatccaccaatagtatctagtataccagaacccttaacactttcacctaatttctttaattgttcatttacattatctgatacattatctagtgtatttttcatgctattgtaatcataattttggtcagctatttttttcattacacctttaatttgttctttttgttctggtgtaatagtaatattgtaattatttacaacattatttattgtatttgctatttgattggtatcttttgtaccattctttacaatttctgtttttatatcattcattacacctgttgctttttcttgccctatatcatctcctaagtcacctgtaactaccaattcttcagaagcaatttctttcttagtttcatcaagtttctttcctgaagcatcctcaaatgctttcatgattcctgtcaatgctccagtaccacttacaggatatggagcagcagcaataacatttgcatcttcaagaccagctgttgtaagggttgaagcaatcattgaactagttacccaagttaagtttgctgttttaacattaattccatttccttttttagtaggttcaacgtatgagcaagagatagtaacttttccaagttgaccctctgttgcaacaccttgtaaatactgtctttcttctgcatttgttacatctaaaactaagacttggtctttttttactccaaagtaattaagcatttgctgcttttgagactctgataagttagctccaagtgtaactacatttgtaccatctgcataagaaaggttcatactcccaagtacaagcatagtagacacaacaatagaactaatttgttttttaaacttcataatattcctcctagatttaacatacattacattttcaatctatttttttattaatatattgaataaaaatatgtgctacatttctattatactaaatataaactattttttaaatcaatgcgattacaactttgtaataaaaaagggaatataaggaagataataaaaaaataatttttgtaagagattgaaaaaacaattaatgtagtatactataatatagaaatgattatgataatgttatagaatcggaaggagaaaaataaatgtcaaaagaattagtaaaagatagagtaataaaatatttaatagaagatttattagtccctcaagatatgattgatacaaatgttgagttggcagaatttgaagaaggtgcagaaggagttttagatattgttgtaaatgttaaagatgaagaagattattatgcacctgtaatgatagtgcaatgtttagatgaagatgtagagttagaaggagaagttttacaaaaacaaatagaatttttagaagaagtggataatataactatgtcaggtagattggttttaactaatggggatgctatgatgtacgctgattggagaggggaagaatacgatactgaggcagctcttccaacttatgatataatggtaaaagagtttcatgaaatggaacaacaggcaaaagatttagaagaacatcatcaccatgataaaaattgtggatgtggatgtaatcatcatcatgaaaattaaatattgagcatatatataaaaaaagactgtttagtaaacagtctttttttagacatatatcattcaaaaaactaagaatataacaacatataataaaataaattatatatataaggaggatattgcggttagaagtagaataatattataggtatagtttttataaatttgtatacataatatacaaaacaattcatttaaagaatgggatattatgtaattgtagattatgtaggtttaaattatttatttttgttttagcaaattctatgaatagaaggggtttgattatggatactaaaaaagaaaataattatgaaaattatatttgtgtgggttcatcaaatgtatcaaatgcgatgaaaatgtatttaaaggaaatagaggaatacaaaatgttgtcagcaggagaagaggtagagctggctaaggaaataatcaactcatcttcagtagcaaaagaaaaatttataaattcaaattataggttggtagtgagcatagcaaagagatataaaagagatagtattgatatgttggatttaattcaagcaggaaatataggacttataaaagctgtagaaaagtacgattataaaaaaggatacaaatttagcacttatgcaacttggtggataaaacaaagtataacaagatatatcgacgattgcgaaaatactattaggatacctatacatcttcatcagagaataaattttgtaaagaaaaagaaacaagaacttttaaatgtattattaagagagccaactatagatgagattgcagatgcatgtggcttagaagttgacaaagtgttggaattattaagaagagataaaaatgttgtatctttggatactccattaaaagaagatgaggatagtagtttagttgaatttataccatcagatgctgattttaaagatgttgtaatacacgaagttgaacagcataatttaaaagaaaagatagaagaactacttacaggtcttggtgagcaagaacagcaagttttaagaatgagatttggaattgatgatgatgaccctaaaacactagaacagattggaaaggtatttggagttaccagagaacgaataagacagatagaagctaaagcaataagaaaattaagacatccaagtaagttaaaacaattaaagcatttttattaatatttttagacacattatatatgagagtatgagaaagcatgttaatctctacttaggaattatttttttataaaatctgtttatgaacagcacacttgtattttataggtgtgctgttattttatttatttaataaagtacataatagtttagtaaaatttctcaatatggacaaaatatgttagaatatagtttaaaaagataataaaatctgttttttacttttaaagttatcgggtagcaactccatttctttgaatataattgaagctatacaatttatataggaaagatgtaaaacttattggagaaataaaaaaatatgaagaataatgtagtttgtgatatattaagaaataggtgttaattatattttgatagggctaagcaaggcaaattagttgatagaattatatctaatgagccaaattttacttgattaaaaagaggtatgttagaagtggagtgataaaatgagcaaggtagctaaagcaactttttatttgatgatagttactataatctctaagattcttggaatgggtagagaattagtattatcatcaatttatggtacaggcttatatacagagagttatttaacagctatgaatataccaaatattatatttgcagcaataggtactgctatagttactacttttattccaatgtatcaagatataagtagtaaacaaggtgaaaagcaagcactaaagtttttaaacaatgttttaaatataatagttggtatatgcatagttgtagctatattaggagttattttctcaaagcaacttgtaagtatatttgctataggatttgaaggagagaggtttttacttaccgtaaaatttactaaaatattgataacaggaataatattcataggtattacgagtgttatgtcagcatttctgcaaattaaagagaactttattgtagttggatttgggagtataccctataatatagtaataattatttcaataatgttaagtaccgtatttggaccatacatacttccaattggtgctgtggttgctatggtagttcaactgctcttttacatgttttttgttaaaaaaacgaactacaaatacttatactacttaaactttaaagatgatagccttattaaattactagcattactttcaccagtatttataggtgttgctgttaatcaagtgaactcattggtagatacaactttagcctcaacattagttaaaggaagcattccagcacttacttattcagatagattaaatggttttgttacagggacatttacagcttcaatagtatctgttatgtatcctatgttatctaagttaagtgcagaaaataatcaaaagaagtttactagttcagttaaatctagtataaatatgataataatttctatgattcctatttcagttgcttctattttttttgcaactcctgttgttagaatcatttttgaaagaggtgcttttgatgcgagggcaacccaaatgacagcaactgccttaattttttatgcagttggtatgactgcatttggattaagagatattttgggaaaggttttttattcattacaagacacaaaaacacctatggtaaatgggattatatctgtaggggtaaatatagtattggacttagttttaataaaaccaatggctcatggtggtcttgctcttgcaactagttcatcatcaattgcatgtatattgttactcttcttgaacctaaagagaaaagttggatattttggacaagataaaataataaaagcaactttgaaatcggtagttgcatctttaattatgggtgttttatcatactttacgtataaatttatatttggaattttgggagtaggaacatttaatgagtttgtatcactagctatttcagttatagttggaggtggaatttatacactactaatgactatttttaaagttgaagaggttgatatgatactgaatattgcaaagagaaaattgcatttaaaaaagtaatctaattatattaattataaatttaggaggattttatgaaacatatattaaaaacagtagaccatactattttaaaagctacaactacatgggaagatattaaaattttatgtgatgaagctgtagatatgagtgtagcatcagtttgcataccaccatcatatgtgaaaagagcatcagaatatctaaaaggtaaaataaagatatgtacagtgatagggttccctttgggatatcaaactactgctacaaaagtatttgaagcaaaagatgctattgaaaatggagcagatgaagttgatatggttgtaaacatttcagatataaaaaataaagattatgataatataggaaaagaaataaaagaaataaaaaaagctataggagataaagtattaaaagtcattatagagacatgttatttagatgaagatgaaaaaataaaaatgtgtgaaatagtaacaatgtcaggttcagattttataaaaacatctactggaatgggaacaggtggagctactttagaagacataaagcttatgaaagagcatgttggaaaaaatgtaaaaataaaagctgcagggggagttaaatcaatttctgatgcagaaaaatttatagaggcaggagcagaaaggttaggaactagctcaatatgtaaaatattaaaaaatgaagatacaacagattattaaagtttttaacttatgggataggattacaaaaatcaaaatttaattataaatataaagaacaaaaaacagagggaattttccctctgttttttatttagtattgacagaaaatatttttcaagatattataagttatatagttaattagttgagtaactaactaatggagaaaggaggaacctatgaaattagtattaaataatgaagaacctatatttattcagatagcacgagcaattgaagatgagatactatcaaatggaataaaagaagaagaacaggttccatcaacaacagagctttcaaagctttataaaattaatccagctacagtattaaaaggtataaatatattggttgataaaaatattttatataagaagagggggatagggatgtttgtatcagatggtgcaaaaactattataaaagaagctagaaaagaaaattttaaacataattttgtaaaaaacctacttcaagaagctaacaaattagaaataaatagagaagaattggttgatattataattaatttcaaggaggattaatatatgaggagttctattaagatagaaaatttatctcacagttttaagaagcaaaatatttttaataatatgtctctaaactttgaaaaaaataagatatatggtttattaggtaagaatggagctggaaaaacaacattattaaatataatggtaaatcagttaattcaaaatgaaggtgagatagaaatattaggaaagaacccaaaagaagatataaaagttttggaagaagtttgtatcgtcagggaaaaagaattttatagtccagattttaaagtaggtcagatatttgaattttcttctagtttttataaaagttatgataaaggcttagaagaagaattatgcaaatattttgatttaaatactaaaaaaaagtataaacaactgtcaagaggtatgaaaactatactttcaaatataataggtatttgttctaattcagctatcaccatatttgatgagccaacaattggtttggatgcagtaaatagacaagagttttataacataattttagatagttatataaaaaatccaaggacaataataatatcaactcatttgattgatgaaatagatgatttactggagcatgtaataatattaaatgagggaaaaattattatagatgaagaaattgatgtcataaaacaaaaagctcattatattactggaaataaagaagagttagaaaaattagaatgtataaaaaatataaaacctaaaaaggcatttggaaatgcagttgcttatttttactatggtgattttagtgaaaatgatgaaaaaatacttaaaaattcaaatattgatgtaggatacatagggctacaagatatgtttgttaacatgactaagaaggaggaattgtaattgaatgaattaaagccatatataaaattttttaataaaaatactaaattgtatataattatatttatgattgtgggaattgttatgaatattttgccagtgtttatcctcaagatttttggagaagcatctaaaactaatttatccacgattgtgaatcctattttaacatatataactatactgctatttgtgtatggagtaaatatagcaaataaagacttttcaggagctttaagtataagagcagatcgaaaaagttgtataaaagctattgtcatagatttaattattttaagctttgtgatttctattttaggtatagttttgatttttttatcgaagttatttatagaaattataacaggttacagtatagaactatcagttttactaaagagagatatgatttggacatctatatcagcactgatagatccttcaacatcaagtatgccactaacttatttaaattattttgtacaaatatgtataaatgaaatatgtataggttttataggagtattacttggagcttttacatatagagttagaaaagttactagtattactatattgataggattaccgatattaatggtaatttatatagttaattttgcaactaaaaatatgcataaaatgctattgtatttagaaaaaattatttattcatttcagaatccttttattttatttggaacaaaggtaggaattatagttatttgcataatatttataattttattacttagaaaagcaccaattaaagagtatgcaaatgacttattataactaaaataaaacctgcttaaaaatcaaatttgtaaatttgtattttaaagcaggtttattagttttaataaatgttgattttaagcattaatttttaatacttatatctacctttatatttttttataaatagaatagatataaatatggttataacctcagcaaatggaactgtaagccataatccagtcatgtttaacataggaggaagaattatgattcctatgattataaaaacaaaggcacgactaaaagatataatagctgaaatttttccattgtgaaatgctgtaaaaaatcctgatgcaaatatatttataccaacaaacaaaaaagcaaatgcaaatatttttaatccttgtaaggctagtttaaatactgtgttatctggacttacaaaaaccctaacaataaatggtgcaaatactaaagcaataataaacactaaaagagaagaaacaaatataaattttagagaatgtttaaatgtttcttttaatttatcactgttttcagcaccaaaattatagcttattaatggagacactccagcagcgaatcctagatagactgatgtcattaaaaaatgagcatacaatactatagtaagagcagcaagtccattttctcctgctaattttaaagctactacattaaataagaatgttgtaattcctgtagataattctgtaaccatttcagaagaaccgtttatcatagtatctcttataagtctaaaatcggtttttggttttcttaatttgagtgtagatttattagataagaagtaaataatacctaaaacacaagttaaaataatacctatagcagttgcaactgcagctcctaaaagacccattccaaaatatttaataaatacataatccaatattatatttgttacaccaccaatgactgatagaaataaactaaatttagaatttccatcagttcttgcaaagtactcaaatataaattttaaaatataaaatggtgtacataaaatcataactttaccataagttatacaatatggtaataacttatctgttgcaccaagcaaaatagatatttctttgataaagaaatatgagattactgtgaatgaaatcccaacaatcaatgaaaacaaaactataaaagaaaatgtagagttggcttcatcctgtctattttcacccatacgtatagaaacgatagcacctccacccgttgccatcattattccaaatccacaaacaaggttaattataggtagtacaatatttatactagcaagagcatcggaaccaactaatgttgatacaaagatgccatctattattgtgtacaaagatataaatatcatggatataattgcaggagaaacaaattttagaaattcaaaagtagtgaattttcttgtaaataaattttccataaattttacctccttttattactctctatctataataagctatatagtaactatatagtcaagaaaaattttatttatacgataaacagcttaaaatcaacaaaaaatcatattaagataaattagtataatgctaattaataaacttatattagtaaaaataggtatattgcattagtaaggaataactgtttcttaagaaaatttttagaaatatatgtatataatcttaagctttataagttattatatatatataagattttgtctgaaaagaaatagattttaactatatatcttttatacaacttattttaaattagttcttatttattaaatataatgttttaatatagaagagaagttatttttatttcaagcagccattttatatactatataaattctaggagtgtgagatatgaaaaagttttttatggtagttttaggatgtatttttgttttaggtgtgatttctggatgtagcaaaaaagaatctaagccagtagaaaaaaacaagagtaatagtgaatggtttagtaatttagatacggaggatgttgatggaaataaggtaacaaaagagatattttcaaataaagaacttactcttattaatgtctggactacttggtgtggaccatgtgtgggtgaaatgccagagcttgaagcattatcaaaagaatatgagagtaataattccaatgtagctataaagggattagttgtagaagttgataaaactgatatgagaactggtctttcaaatgaagagaaaaatttagttaaaaacattatgaaaaagtcagatgcaacttaccaacaattgactgtatctgaagaacttaaaaaaactgattttaaaagagttatggagtttccaacaacttattttgtagacaagaaaggaaactttgtgggtgagaaggttgtaggtgcaaatagtaaggaagagtggaaaaaaattatagatgaaagactaaaaatggtaaaagccaatgagtaactttattaaagataataaaaaaggcatttctattattgcaattagtattatatttattgcattaggtacatatcgtggagaaacaaatacagtattaactaaagcaattatgatttgtcttgagtgtattggtattggttaggagaagaggaatgaagttattatctaaggtaaataataatataagacttattattcaagttgcatttacagcattaacaaatggatatgtaaatggatttttagaaggaactatatatggaggagaaagtaaaaaattatgtgtacctggattgaattgttattcatgtccaggtgcacttggagcatgtccaataggttcattacaagcagttttatcaagcagagagtataaattctcattttatgttgttggttttttaatggcatttggtgctttttttggcagatttgtttgtggttggctttgtccctttggacttgtacaagatttactacataaagtaccctttccagtaaagataaaaaaagtttatggtgataaatatctaaaatatctaaagtatatagtcttaataatgtttgtaattattttgccagttgctattgtaaatgtagcagggggtggaaatccttggttttgtaaatggatttgcccttcaggaacacttttgggaggaataccacttattttaggaaatgagaatttaagagaatcaataggatttttatttagctggaagttaagtattttgctattgatattattgatgtcaatcattacttataggccattttgcaagtatatatgccctttaggagcaatctatggtttttttaatcctatttcaatatatagatttaaaattgataaagataaatgtacaaattgtacagcatgtcaaacaaaatgtaagcttgatataccaatatataaagatgtaaatagtccagactgtattaggtgtggtgaatgtataaaagtttgtccacaaaatgcaattactacaactttttcaaaagataaaaaagagaataatatttgtgcaaaaaagtatagggggatataatttaatgaagaaatttattctatgtattataatgtttgcaatatcagtactggtgttagctggttgtactaatgataataagataaaaaatgaagtggatagtatgtttaattcaataaaaacacaagatgcagatactgttgataagtatttcccaaaatcagggttaggtaatcttatatacgaagataaagaaggatttaaaatgtattctaaaaatatgacttgggaaatttcagatataaagaataataaggataaagtgactgtagatttaaaaattaacaatactgatatggtttctattttaaaaaagaatcctcctaaactaggagaaatgatgccaaatccaactatgaaagatattgattctgcaaagaaaaaagaatttaatattacattagagcttgttaaatctggtgataattatgtttgtaaagttaatcaagaatctgcaatgaaattattaaatgtgattacaggaggtggtatagattatctagctgactataataaagattattataaacagcttgatgaagaacaaaaaaattatgaaaataaaaatagttagtaatatatatgaaaattggagcaattaataatatagaaacacaaattaaaagaatataaaagtggtagaatgaaagtcttgtagaagcttttattctaccacttttagaaataagttatttcatatgattttattatttatagagctatttacatgtatgtatattttatagaccaagattttctcctaccaatattacctttattttttttgctggacgactgattcttgtagtaaccatgtatgcacaaatgctttcaggacttgtgcaatctatacaacttccattaatatagcatggtgtattgacatcttgaaaacgctgaacaactgctggagatgcaattgttctagttctttgtattgcatcatcaatgttttttacaattttattcataccagctacaactataacattttttggaccaaatatcattgcagctacacgattgccatttccatcaatattaaagagttgtccatcttcactaattgcattgctactcatcaaaaaagtatcgcatagaagtgcttgacgcataatttcagttctttcttctggagtttttgctaaatctctatcaataactttaaatcctttctctctaacagcagtttgtacgcccatttctttaagtgtttcagatcctccccatgatactacatgattttgaggaattaaatctaaaatttgttgcaaagcttcatttctagttttacagtaataagcatcaaaataacgttttttgaatgctgttacaatatgaggacctagcttgtcatatcgtttctctaatggtgtttgtcttatcatactaaaatcactcccatatttaaattttaatattgtaactattatgctaattaagattatacgatatattattgtataaggttaattttataagtaatcttttcctaagattacgaaaatagttacaatatagttataacataaatatgcgattagtataagatttactattagtttttaacaaataactgaataaagaaatacttataaaacataatcactaatactttttatttaatataaaataaagttgtgggttatagatgatgattattttattttatgaataacttgtttaaattttataagtttataaaaaataaaggtacagttaactgtacctttattttatctaaatatgcaaagattattttaaaagtaatttttaattacatgtttttataactctccaatattctaatataatgatttgcctctcttaaaacatggtctgctaaaagtggtaatattatagattttatcttacactgttctattcctgatgctcctgcttctttaaaatctttaaactcaacagtttcatttagagtttcttctgtaatgttcttgatattagaatcagtcatttcgtttgttttttcaattaattcattaaattttatagcaaaatcatttgaagtatttattagttcaccttctgaggggtctagtaatcctctcataaacagagcatgttccatcataatatggtcccagaataattctatttctttagcgttttttgactcaatatctattttattttcaaggtcaactacataagaacgatataaatttgcttcatgtattatatgttcaagaagtagagggtagtttgatgtaaatatagtacatgatagtacaccatctaagactctttctttaaaattaataagcccatcaagtaatcttattgcatcagagttaagttgagctacatagttcactaagtcttgaccaacttgtgggtttacaccactttgtagatttaattctcttgtagtgatgtctttgtttatttctatccctgtaaactcttctgttttttgttctgcaactgatgtgagagtagttacaagctcttctgaatataatatatcaggtctaattataccattactagcactaacagtgtatgataataaatcttcaaattgctttttatagtggtcagcttccatagcaagattataatttttatttgtgaatcctgcttctaaaaaaagagcatgctctttcataattcttgaaaaaaataaatgtaattctagtgataaaataacatatttttgattatctatcataatttcctccctttagaaagtatcctatttataatactttattcgtaatatttaaatttatgtatattataaataaattaactaaattcaattgctactaatatcaacagtttttattaagttatgggcgaaaaaattatcttactgtgtttcttattagatatagatataatgatttaaggtacttgttggctattatttattaagagcacaagtaatactagaaatttttatgagaattatgtaatttataagtattattttgatacaaaacaaatattttttgtgaaacaagaacttttatagcaaaaaatgaataaatatgaagcaatcataattttataccacaacaattattaattctaatagctgcacttaatgttttaggtatgggatttaaaaagtataaaaaattaagtgataaatatattccattatattgcttgtgcttggagtagtattttctgtatggatgttaggatttaatccaacttctattttacaggggattctatgctggggtgtttcaattggattaaattaagtatgcaaacaatttcaagacaatgataaataattggatgtgtgataggaatatcaacaaaaaacattattaaaaagaattattttatttataaaataaaacaagtaataagaataaataaggagcaactaaaatgatttaaatatactagaattaaaaagagaatgtaaagttgtctagtaatggaggtaaaatattttaaacgataagctatgaaattgatatattaaaatgggtaagaagaatattatataggattcttcttacccattttaataaatttaattttatgccaaaccacattcgcatagtagaatcatcactctatggagacataactctacaacatcttctccatattttttaataaaatcaccaatttgagtttctatgaatgaatagtattcttttaaactagcaatatatgcagtcattatatgaacacattcatcaatcttatctttaaacacaactaatccccctaaaaaacgaaaaataaaaatattcagtaaatagcagatattatttcactcataaatctatatagtatgatatattgcttagatatattttacaagtggatatgtaaaactggttattataatcgcaaaactggataaactttcattcttaaaagaaaatttatccagtttaaagtttaattatgaatatttgagttagtagatatttaatataaattaatataagtgtaataagaatatacttatataattataattaatcatacttttaaggaatttaattttaaaattttagttattgtaatctattattttctaagcaatttattattttttaggtaatttattactttttaggtattctattattttttagatatattatataaaattatatactatatatttaactcaaatgtaaaattatcaattagtctggtttttcctataaacacagcaattgccacaaggatagaatgttctatttgcttaacaggttgtaatgtctcactatctacaatttcaacatagtctatttttgctaagtgttcagaatttattttagctgttattaattcttttatattctttggatttagattgccttttactaattcttcttttgctaaacttaagctcttatttaatattagagcagattttcgttcttcctcagagagatatgtatttctcgaactttttgctaatccatcattttcacgaattataggacagcctattatttctgtatttatgtttaaatccttgaccattcttttaattacagccaattgttgggcatccttctctccaaaataagctttatcaggtgttactatatttagaaactttgaaacaactaggcagacacctccaaaatgaacaggtcttttagctccacaaagaaaatctgtaagtccagaaacattaatggtagtacaattaccttttaaatacatttcttctggtgatgggttaaagactactgttgctccactatccatacaatatttaaaatctttatctatatctcttggatagctattaaaatcttcatttggtccaaattgagttggatttacaaatacactcactactactttatcattttcttttacagctttttttataagactttggtgtccttcatgtaaaaatcccattgttgtaacaagccctatagaatagccatgttttctccaatctttgattatatttcttagtaatttaatttcttttacaagcattttgtaccatccttaatattagtataatttttctaactcagattcatttattgaaaagctgtgtttttcttgtggaaatgcacctgtattaacttctaggatgtaatttttaattgaatctttcattatatctcctatatttgcatactgctttacaaacttaggaacaaaatctccaaacactcccaacatatcttgataaactaaaatttgtccatcgcagttaattcctgcccctatacctattgtaggaattgaaatagaattagttaccatatcagctattttcgtaggaactccttcaaggacaatagagaatgcacctgctttttctattaatttagcatcttcaataagttgtcttgctgtttcactggtatttccttgaaccttaaacccaccaaatgaatttactgattgaggagttaatcctaaatgccccattacaggtatctgagcatttacaatgctttctatttgctttataacgtttgagccaccttctaactttacagcatgagctcctccttcttttataagtctaccagcgtttttaactgcatcttctatagaaacatggtaagatagaaaaggcatatcacttacgattaaggcattttttgcaccattttttacagcttttgtatgatatataatttcgtctatagtaacagatagagtgttttcttcaccttttatgaccattcctaatgaatcgcctattaaaataccatttatatcacattcatccattatttttgcaattgagtagtcataagcagtaagcatagatagtttttttccttcatatttagcgttcttaaaagtctgtatggtatttttcatcgttttttcctcctaaaagtttgtaaatttctttgtatttttcagatttacttattaaattttcgattgcattttctatagtaatattttttgtaccttttaatgaattgtcatttcctaaggcaattatttttagtaggtttaaggatagtattttgtagatatcctcatcttttttattcaatacagatagatgtttccttattggtgttatatctccacgagaaacaggaccagtaagagctttagtaaagccattatcaagtatattttctatatttttttttactaaaggactgatagcttttaaagattcctcttcagataaacctaatttaataaagtaacttactcctatatctagtaaagataatactaaatttgaaactaaaacattagctagatgataagtggatgaagtatccttatctcttataaaaaattggtttcccaaaccatctatgaaattttgaataactaaatcatcttgttcattatcaccttctatggaaaaacaaatgtctttcattttttttatgttggtatttttattggaaaatgcaaatataggatggatagaataaattaatgcacctgctttttttgaacagaacaatatactagattttaaagagccacttgtgtggcaaatgtatttatgttttaaattaaatttggaaagttttttgtctataatttcaatagaatcatctgatgttgtaataaataatatatcgttttcataaattatatctctcaaattgctgtaaatctttgtttttgttaaatttattgattctaataaagataattgattccttccataaaagcctgaaacacaataaccttttgataaaaaataatttgccaaagatgttccaacttttccagaaccaataaagcctattttaatagtatcacctccactttgtgatacaacatcttaatttctaatctcattcctgaggatatgagttacataagacaaaataattaaaaacatttaaagtatagttcttataacaagataccatccataaatatcttaccattttcataaaaaattgacaattaattctataaaatttatataataaaatatcagtaaaaaaattatgatatttataaaatataagttttttgttttactatatatattaaaagtgattaagtctattagaaaaattatgatgtttttagaaattaatgctttttaacttcaatagtatcaataatactgattttttataaaaatttaaaacaataataaaatatataatttatttttgtggacaatttgtcaagattagtaccaagttaaaatttaatataagagagagatgtattatgtaatattaattttttttaaattggtaatactatattgctgtatttttttttatcaattataatttaaaatatgaaataataaactttctaattaaattaaggtatttagtgtgtatgtataagttataagtaaatcttctaaaaagaataattttaacagtgttgttataaagagcagtaactatggaggagataagtatatgaacaaacgtaattttgaagttatattaaatcaactacagattaatatatatgttacaaatattcatactaatgaaattatttttatgaacaagaaaatgaaagaagaatataatattttagatccagaaggaaaagtttgctggcaagtattatatcctgagcaaaattctacttgtagtttttgtaaagttttagaactattaaagaatgataaaaaaggagtattaataaagtggtatgaaaaatgtaataagttaaatcgtgtttttgaaaattatgatagtttaattacatggcaagatggcacagttgttcatatgcatcaatcaatagatattgcaaactcaacaatcttaaataaaccaattaagattaatgaatttaatgaaatatcaaatactaaagaaggaaaaggagtttttaatttttcaagagacaattttgattataattctacattgctttatgatgctttgattagaggtacagatgaatatatatacatttgtaatatgaaaacaggcgtatttcgatattcaccatcacaagttgaattatttgacttaccaggagaaattgttgaaaatccgcttatttactggaaaaaaattgtacatccagaagactggaatcgtttttataagtcaaacactgaaataggtaaaaaccagatggattatcatacagtggaatttagggctaaaaatcgtagtggagaatatatatggttaagatgtagaggacaactaatgcgtgatgaatttggagaaccaagtatttttgcaggaataatgacgcaattaggtaaacaaaataagattgattcattgacacagttactgaattatcatgaatttatgagtgtatttgaagataaaatttcaaatcctatgattgaaaaattatgcatagtattattaaatattgacgattttaaaaatgttaatgagatgtatgatagggattttggagataatataataaaaacactagcacagtctatacaatctattttaccagataatgctgaactttataaacttgatggggacgaaatgggtattcttgttgataatgttgaagaaaatgaaattctaactctatataatcaaatacagaatatgattatacaccttcaactatggagaaaatatggattaaatataacaatttctgctggttgtgtaatatatccaaaacatggagatacagtaaaagaactttataaatgcgctagttactctttacaatatgcgaaagagcatggtaaaaacaggcttgtttttttctcccaagaaatattaaaaaataaaatgtattcattagaaatgatgcgggatttaaaggcatcaattaatgatgattttaggggatttagtcttcgattccagccacaagtagatacacaaagtcataaaataataggtgtagaagttcttttaaggtggactaatgacaaatgcaaagcaatttctcctttggaatttattccaatattagaagaaaatgatatgataaatattgtaggggcttgggtgcttcgaatggcattacgtacttttaggaaatggattgattactatcctttttttaaagtgagtgtaaacgtttcagctgttcaaatattagaagacacatttattgaagatatagtaaaaattatagatgatgaaaattttccttatcaaaatcttgttttagaattgacagaaagtcatacagtacaaaatatgagtattttacagtttaaatttaaggctttacaagatttaggaatttatattgctatggatgattttggtactggatactcgtctctagaagttttaaaattttctccaatagatatagtgaaaattgatagagtatttgttaaagatatattaaagagtaagtttgatgctacatttatacattttattgttgcaatttgtcatgatgtaggaataaaagtatgtttagaaggtgtagaaacacaagaagagtatgatttagttaaacaaataaagccagattacatacaaggatatttatttggaaaaccgcagacagcaacagaaatctttgaccttttaaagctagataattaattctaatttatcaataatatcactgaaaagctttaaaatcaaaaatacattaaattattatattgaagatatatcaattataaattgcaatataagaaaatagcatttcaagggatgttaaattaggagtagtatatgattaaagtattttaaaaagggataactataataaaaatagatatctatttttagattaaaaataatatatcataaataaaataataagaggtagatacagttttaagggaatacaaaagtttttaattaaactatgcttgttcagatagatatttatttaagaaaaaagactattaaaagcaatatacaagaatgatatattagattgattaaacaagcataaatattatgtaaaaaactttaagttatagaatttaaatccaatgtagatagattacgttttttcttgcttttattatggtataaattggtatcaatattcaaaagtaatatatttatgatataataaaattatagaaattttgcagtgagctatatttgtgataaaatttggcgtaacagttgaaatataaggtgttgagagtgcatgataagcgttatcaattgcactattgctcgttcactgcaaatttaggagagttgtatacgtgtaagtgttgaaaatactaagtttattttggggttttatattaactatatggaatgtaaatctcggagaatttcctaatgtggatttaataggaagtgttttatattaactatatggaatgtaaattttagcaaatttttcgtaaaagtcactattttcaatggttttatattaactatatggaatgtaaatacatataaaactttcatcttctgttaattcattaaaacgttttatattaactatatggaatgtaaatccatcttttgttgttttacataaatttatattacttacgttttatactaactatacggaatataaatttttataattttcttttaatgtgttatcttatgattatctagttatattagcatacaaaaatataataaaattacactatattataaaaaccaaaaggtagtatagaaatcctattacctttttattattaattttatcagtgttttattataaatagcttacataattacacattttttctgattaaataatatgatgctattgttataatagatactaatgctaatgatgttattgcagtatctaatcttcttattaataaactcatttctatatattcaagttctattaaatattgataaaatatttctagtttaacagctttttctctatctatatttccatactttaactctaatttatctaaagattttttattacaataattaactttatgtttaattaaatatcttattgtagcacctattacaattttcactctaacaagcataaatataatattccatccaaaagttaagaggggatatcttttttatgagaggaatggataaaatatttataactgacatctaactgatatttaagctttaaaatcaaaaccatattgattttctaaaataataactacttgatttagtaaataataaagaatatagtaactatatagacaacaaaaagaaaaggagtgtataacccttggaaaaacagtattttacaacaggtgaatttgctaaattgtgtggtatatctaagcagacattaattttctatgacaaaataggtattttttctcctgaatataaagataaaaataattatagatattactcagtttatcaatatgatacacttgatatattacaatcattaagagaaataggaatgagtttagaggaaataaaagagtatatacaaaatagaactccccagctttgtgtgaaaatgcttaaagaagaagaaaaaaagataagagaaaaaataaaaaaactaagaaagataagctctaagatgcaaaatagaataaatataacagttgaaggaatttctaaaatgaatagtgaagaaatttatatatccaaaaagtttgaagaatatttagttctatcaagcgatttgagtaatatgagtaatagtgattttatgatggaattaatagatttcaccaattattgtaaatcgaaaaatttgtatcaaggatatgagttgggagtaatagtaagtaatgaaaatataaaaaatggggactatttaagtatatcaagtttttatttgaagatagataaaaaaataaaggataaaaagctatatgtaaagccagaaggaatgtatgcttgcataaaacatattggaaaatatgaggattcatataaatcttacgaaaaattgaaaaaatatatatatgaaaatgaatataaaattattggaaattcgtatgaggagagtatacttgactttttttgtgaaagtaatgaagataattatatgactgaaatttcaattcaagtatccagataagaattaaaatagagatatattcaaatgttaagtaattttacttatcattgaatatatctctatgctttataataaagtatataaatttttaaatagtttctctaatatatgtctaatgtcagttaatactaattatataaataaattgtaaactgtagttgttaaaaaacaaacaacaaaagcaagtatagtaggcattaagaatcctaaggcagtccattttaaactaccagtttctttttttattgttaaaagtgttgttgcacaaggccaatgcagtaaactgaacagcataacatttaaagctgtcaaataagtccatccatgttctctaagaacttgacctaaagcactaaagctatctaattctatcatagaaccagttgctaggtaagccattaaaagtataggtacaactatctcatttgctgggaatccaagaataaaagcaagtaatataaaaccatcaagaccaattaatttagctaaagggtctaaaaagtttgcaacatgtgataatatgcttaaatctcctatatatatatttgcaaatatccaagttatgacaccagcaggtatggctaccattacagcccttcctaaaacaaatattgttctatctattatagaggtatataaagttcttcctatttgaggaactctataaggaggaagttctaatgtaaatgtagacggaactccttttaatagcgtcttagaaagagtataagaaaccaacaatgttattataacacctagaattatcagtaaagttatgcaaagtgcagttgctacgcttgatacgaaagagttggttataactgagctaaaaaatattgtagatatagctatcaaagtaggaaaacgaccattacaaggaacaaagttgtttgtaagtatagctataagtctttcccttggagagtcaattatcctacaaccaataactccagctgcattacatccaaatcccatacacatagtcaaacactgttttccatgtgcacaagcttttttaaataggtggtctaagttaaatgcaactcttggcaaatatccaaaatcctcaagtagggtaaataatggaaaaaatattgccataggaggtagcattacagagattacccatgctaatgttctgtataatcctaaaaccaacatatcatttaaccatgatggacaattaatactatttaatatacccgaaatacttggctcaaatccgagtaataaattagataataaagtggatggatagttagccccttctatagtaatccacaatatagtacctaataataagagcattattggaagcccaaatattttagatgttaatattttatctactttttcttctctatcagttgattttttagcaacattagaacaacactcatcactcagttttttagcataatcatagttgattttagtaaactcatctcttattttctgtttatttatattgtctggaatctttttctttacttcattaatagcatctatagaatctttgtctatataattactcatagattcaaatatactttcatcgccatcaataagtctaagtcccaaccatctagaatttatacctggtataatattatccaattctggttgaattgattttaccacattctctatattttcattgtatctaacaggtttattatttaatttgtatttgtcaaaagatacatcatttaaagtatccaatagttcatccataccagagccatttcttgcagcagttaaaataactggaataccaagagaatcctctaaaagttttttatcaatagtaatgcctttttttctagcttcatctattaaattaatacacaaaataactttatctgtaagttccatcacttgaaatactaaatttaaatttctttcaagacatgtagcatcacatactactattactgcatctggattaccaaaacatataaaatcacgagctacaatttcttcttgtgataaggcaaataaagaatatgttcctggtaaatctattaatgcatattcggtatttttatatttaaaattaccacgagctgtagctacagtttttcctggccagtttccagtatgctgtctaagccctgtaagatgattaaatacagtacttttacctgtatttggattgccagccaatgcaattacaaactggtcttccttattgtctatatcaaacatatcttttaaagaactcattttagttgagttatgtgtcaaccccatattaatatcctcctgctagaaatttttaaatgtcagaaactaatattaagctactttcttcttgtcgtagagctatcttactacctctgattttatagacagttaaattattttttggaccttttctaactacatctataacagctcctctagtaagaccaagcgctaacattctttctcttaaattaccactagataatatatcttcaactttgacagtttttttcacttgaatatcgttaaggtttttcatagtagcacctccatgcttgaaatttagcctgggctaatcttcttattctaaactatgcattatattattaccttgttacttttacaaaaaaaagataggcaagatgcctatcatacaaagttgggtataattcttacttttggggaaagtagaatatagaataaaaattaacactttgaatccatataattattgaattttgataataaaaaagtcagaaagcaaaagcctcctgactctatgtaaggtattttcaaatacctaaatatcaattcaatatttaatttatacttaaattatatattaacaatattagcttgtcaacactataatctcattttaatatgttcaatacctgcttcgtcgtatacttctgagatttctttaaaaccacaagataagtaaaggttctttatataagtttgtgctgataaggttatattattttcgtgtaagttaatttttataaaatctatagcacaatccatcatttgttttgctaatccttttcttctatgactagaaagaactaaaactctaccaatggaaacatcattataagagctgtattctttaggaattattctagcataagcacaaatcaatccattttcttttaaaaatatgtgataagagcttttatctatatcatcataatcgtttaatgaaaatatcttctgttcacaagcaaatacctcatatcttgattttgctatttcataaaattcatctaaactcaaatcattaaagtgtttaattttaaacatagtaattacctcctagcatcttaaaaaactgaatattaagatacattataccatttttaacataaatacctttattaaaatttatatttattaaaaatatttttaaaaagtgatatactatattaaaaacaaaactttagttagaaaatttatgatttatggaggcagtgttttgaatactactaaaaaattaactgaagcagctttattgtcatctttattcatagtagtaacaattatagctgtgagtactggatttggatatgctatttacttagattttatagtgccagtatttttttgtataatctgcttgaaatgtgatttaaagtataccattttatctggaattacttcacttttaataatttctctggtacttggaaatctaggaactgctatttgggcaagtcagagtgtattacttggtataatgtgtggctatctaataaataagcctacaatggttatggatgatttagtatatggttcagtatttggggttattgtaatggttttcattgatatatatgcttcaacattaataggttatagttttatgaaagaatttcaaggatatagcaaatggatttattttaatgggtatacaaattttatttattatttaatgatagcattgtttccttttggtatggtgttttgcatatatttattaagtttaattttagggaataaattgcatattttagattctaattctttaaaaaaatttttaatatttaagaattttagaagtttaaaccaatttttatgttgctcaaaaaaagctttttacatatgtgtttcttatctagccatttttgaagttctaaaactgttgaatgttaaagttgattctgtttatttaaaaacaatctttatatcaataacctatataagtgtctattttatcattagagactcatgtatgtcactacaaaactttataatagctaagtttagaaaattattatatgctagaattttatttttgataataattttattgctgttttttatatttgatgtaacagttattagtttaataattataaacgcatttttaaataagaaaataaatataagattgagtcagagtaatatagtcaataaacaaataaatcttttgattgaaaaataaactttgggtattggtaaaaaatataaaaaagtagtataatgtaaaaaaacatgtatataataataaaaaaggttgacaaaatataaaaataataatatattatgagtaagttaagaaaaatttcttgtaattgatgaaataatctgaatatataaatgctatgaagagaagaagtagggctagattttatttaacagagagttccagtttggtgaaatggaataaattgatttagtttgaatacatctcagagcactatctctgaaagataacaaccattaagagatatcggattagtacacgttatagtacacgagtatatgtaattgtactctaagagattaatatcgtgagatattgatgaactaaggtggtaacacgtaagcaatgctttcgtccttttaagaggatgaaagctttttttattataaaaaaaaaattatagattatataaatattttaggaggaatgaaaaatgaaatcgatagacgagcaaatgcgaataattatgaaaggtgtagatgatttaatagatgagaaagagttaagggaaaagcttattaaatcagaaaaagaaggaaagcctatgatagtaaaattgggtctagacccaagtgctccagatatacatttagggcatacagtagttcttagaaagatgaaacaattacaagatttaggtcatcaaatagtaataataattggagattttacaggaaaaattggagacccaactggaaaatctaaagctagaaaagctttaacaacagagcaagttcttgcaaatgcaaaaacttatgaagaacaaattttcaaagttttagataaagaaaaaactattgtaagatttaatagcgagtggttagccaagttaaattttgaagatgtaataaaattagcagcaactattactgttgcgagaatgttagaaagagaagattttaaaaagagatatgaaggacaaatgccaatatcagtacatgagttcttctacccattaatgcaagcatatgactctatagcattagaagctgatatagaacttggtggaactgaccaaagattcaatttactaatgggaagatcattacaaagagaatttggtatggagtctcaaatagtaataatgatgcctttaatagaaggattagatggtaaagaaaaaatgagtaagagtttaggtaactatattggaatagatgaagaagcgggaataatgtaccaaaaatctatggaaattcctgatgaacttataattaaatactacaatttagtgacagatgttcatcctgatgaagttaataaaatagaatctcagttgaaagagggttcagtaaatccaagagatataaagatgaacttagcaagagaaatagtaacattataccatggagaagaatctgctaaagaagctgaagaaagatttaaatctgtattccaaaaaggtcaaatacctgaagatatacaaacaattcaagttaaggaagatggatttgacttaatcgaagtactagtttctaatgagattgttaagagtaagagtgaagttagaagattagcttctcaaggtggagtaaaggtaaatggtgaaaaagtagaggatttaagcactattgtaaaagagagtgaattagttgttcaaataggaaagaaaaaatttgtaaaaatcgagctagtaaaatagagtaaagtaaaagcaagtctattgagtataaaatgtacattcaataaacttgcttttttattatattaaaattttaaattgataaccattgtctttaaaatatgttataatttggtccaatgcatttactgtttcttgttttccataagtatcatgcattaaaagaacaaccatttctttgccttcagaagatttctttgcatgttcaaataattcttgtgcatttttctttttaccttctgcatcagcatttaaagcgttccaatcaattgatgccatgtttttctcttttaagtagtttcctagaggttccatatttttccatgacatatacccgcctgggcatctaactacatttgaggaaaaattctttcctaagacttttttcatagcttcatcagttttgttaagttcatttacgaatgtatcgagatttaggcttctgccaggatatagttttttatagtcatgggtataagagtgatgggctattgcatttccttcgtcaaatgttctttttaaaatttcattagctccttttctttcaagagaatcacccttaataaagaaagttcctctaacaccatgtcttttcaagatatctagaacttgtggagtattagtagtagatggtccatcatcaaatgtaagaaagactatcttttctccattgtttgaatagtcgtatttgttaagtttgtcccaaactatttttgcgtcatatccatattcttttacagcttctttttttgcaccaataataggttcatttttttctttttcaattctttctttttctaatctttcagctttaagtctttcttgagtttctttcatttctttttttctagacatgtccgcccatgccatagaaaaaataccaataactattacaacaagtatagtaagtgtaacagttttcttttttcttttttttaccataattacagcattcccccttttgtcgaattgtatcaaaaatatattataattatatcgaagaaagtagaaaaagtaaaccgacaaagttgtaactaagataactaaagtgtaacttatatgacattatttgcataatattaaagtatcatatatattaaaaatatctataaaaaaatttagtataggtaaaaaaatataaaaaatataaaaatttattaaaaaggtgtttacaaaaaatgattaatatattactgttaaatagtggatataaatttgagctcaaaatgtatgtaaatttagatttaaaatactgaaaaaatttactatattaatttatagtaatgcttatagaaaaactctcttgctgtttagggggtttataattttgcaaaaaaataaaaaggagggggctttattgaaaaaatactttggagaaataggactaatatttatagcaattatatggggaagtggctttgtagcaacccaatttgcattagacggtgggcttacacctctacaaatcataactttaagatttttcttggcagctataattatgaatttactgttttttaaacagattcgtgccaatatgggtaaaaaattattaaaagcaggagggattttaggaatatttttatttctagcattcacagtacaaactattggacttatgtacactacaccatctaaaaatgcatttataacagcagctaatgttgtaatagttccgttcataggatttatactttatagaagaaaacttgataaaataggaataataagtagtttggtagctcttataggaattgggatactttctttagaagctgatttctctattaattttggagattttctaacacttatatgttcattcggatttgcatttcatatattctttacaagtgagtttgcaaaagataacaacccaatggcattgacagctattcaatttacagtagcgtttttaatgtctgttgtagttcaaacatttgcaggtcaattaaagatggaagctgaattatctggttatatgggaactatgtatctagctgtatttagtactacaattggatttttatttcagactatatgtcaaaaaagagttgatggaactagaacagctataatattatccacagaggctgtatttggtacaatattttctataataattctaaaggaacttattacagcaaaattgattattggtagtatcttgatatttgttgcaatcataactgcagaaactaaattatcttttttaaagagcaaaaaagtgaaacttaaagattcagaggagtcttcattagaaagtatttaatatgacaactatttcctaattaatcaaataagttatgtattatgtagaaatttgacatcaaaacttggttgatactggtgtttcaaagtgataaaattaattaggaaataaattttatttttagtgtttaagctataaagtctggggtatatatattcttgtagcaagttattaaacttaaaaataaaaatttaattatataaaattgggaggaaattaattatgaaaaaatttgtttgtacagtatgtggatatatacatgaaggagatgctgcaccagcacaatgtccagtatgtaaagttggagctgataaatttgaagaaatgaaaggcgaaatggtttgggctgatgaacatagaataggagtagctcaaggtgtagatgcagaaataatcgaaggattaagagctaactttactggtgagtgtacagaagtaggaatgtatttagcaatgagtagacaagctgatagagaaggttatccagaagtagctgaagcatataagagaatagcttttgaagaggctgaacatgctgctaaatttgcagaacttcttggagaagttgtagttgcagatacaaaagaaaacttaagagttagagttgatgctgagtatggtgcaactgatggaaaattaaaattagctaagagagctaaagaattaggattagatgctatacatgatacagtacatgaaatgtgtaaagacgaagctagacatggtaaagcattcttaggattattaaacagacattttggaaaataataattaaaacatagattaaaaggagaaactttggtttctccttttttaaattatacaaataaactgttgtgatagaaggatggagataatatgaagtcggtatctgttaggagttgtaaaacttacaattatgaagaagtaaagttatctattgaaaaaaatttagaggatattggtggtatagataagtttgttaaaaaaggaagcaaagtacttataaaaccaaatttattaatgaaaaaaaagcctgaagaagctacaactacacatcctatggttgtaaaagttgtatgtgaaaaacttttagagttaaattgtgatattacaatagcagatagccctggtggtccatataatcaaaattctcttaagagcatttataaggcatctggaattgaagaagtagcaaatgaactgggcattaagttaaattatgatgtttcagatgttaagatacatagtaaaaaagcacatgttctaaaatatatggatattattaaaccaatagtagattcagattatataataaatctttgtaaattaaagactcatataatggcaacctttactggtggtacaaaaaacttatatggatgcatagcaggattgaaaaaagcagagatacattatagatttcctacagaagagttgttttgcgaaaatgtacttttagatatttgtgattatataaaaccaacattgacaattatggatggtatagtaggtatggaaggtgatggaccttcagctggtactactcgagaaataggagttttattagcatcacaaaatccatatgctatagatgttgttgcatgtaagattataagtttacttccaaatagagttgctacaattagaggtgctattaagagaggctatatacaagaagatttttcagatattgaaattttaggtgaagatataaaagatttaattataaaaaattacaagattccaaatgtaagtaaggatttaagattgttttccgtaaagctaccaaaatttttaaatgaacctatttcaaagcttataacaccaaagcctgtggtaagatttcaagattgcataaaatgtggaaaatgcaaggaagcttgtcctgcatccactatagagatagggactaaaggtgctattatagacttaagtaaatgtataagatgttactgttgccatgaactttgtcctaaaaaggctattgatgtcaaacgtaattttgtatttaagtatgtaaaataatgtataatattatatgagtctatataaattaaaaatataaaggagaaataatatgattttaattaaaaatggtagagtaatagaccctaaaagtcaaagagatgagaatattgacttaattataaaagaaaataaaatttataaaataggcaagtttgatgaaagtgatgaatatgaaaaaataatagatgctagtggtaatgtagttgctccaggtttagtggatgtacatgtacactttagagaccctgggtttacatataaagaagatatagaaagtggagctaaatctgctgctagaggtggatttacaactgttatatgtatggcaaatactaatcctattgtagataatgaagatacttttaattatgttaaagaaaagtcaaaaaatgcatgtataaatgttttacaagcagcagctataactaaaggttttgaaggtaaagagttagttgatatggaagctcttaaaaaagctggtgtaccagggtttactgatgatggattacctttaatggatagcaatctaattatggaggcaatgattaaggcaaaagagttggatgtaccacttagttttcatgaagaagacccttctttagttggaaatccaggtgtaaatgcaggaaaggtagcttcagaactaggattaaaaggtgcatcaagtgtagcagaagatgttatggtagccagagattgtatgttggcactaaagactggtgctaaagttgatatacaacatataagttcaggtgtatctgttgatatggttaggtttgcaaaatacttaggtgcaaatgtagttgcagaagcttcaccacatcactttacattgactgaggaagatgtattggagtttggaacaaatgcaaaaatgaatccacctctaagaagtaaatgggacagagataagattatagagggattaaatgatggtactattgaaataatagcaacggaccatgcacctcatagtaaagaagaaaaagatagagagtttataaaagctccaagtggaattattgggcttgaaacttctttagctcttggaataacaaatttggtgcataaaaatcatcttagtatgatgcagttaatagaaaaaatgtctataaatcctgcaaagttgtacaatttaaatattggatttatagaagaaggggctgtagcagacattgttatattcaatccagaagaagaatggacagttgaaagctttgtttctaaagctgataattcaccgtttaaaggtaaatctttatatggaaaggttaattatacaatatgtaatggggagattgtatataacgcctaatttaagattatttttttaaggcggagtgtacaatgattgaaagtaaaagattgtatatcagcagaatgagattgattaatcaaaattggaagtattagtttgaacaattagaacataacatcttggtaatttagatatagtaaggaagagaatcctttttatgaaagaacgcactattatatttggaaagattaagttcctaatctatcatatataatagtgcgttatatatttaagtatgttttatataaactaatctaaaaatcgaaaatctttatacaatttctacttataaattgcctttatagggtctagtttagaagctttaaaggctggaatcagaccaaatacaactccagtcaatatagtagctacaattgcataaaataagctatttaagctaggtatagcttcaaaacctatatatttagaaacatagttagtagcagcaaatccaactatagttcctaaaattccaccacatactgttataaaaacagcttcaactaaaaattgaaataatatagacctaggttttgctccaatagcacgtcttataccaatttctctttgtctttccataacagatacatacattatattcattacaccaataccaccaacaaacattgcaactacagttattatagatacatatttgtttacattggaattaatgctttcaagataagctgtctgttcagttgggtctggtgtagtataagaaccattgataccagggtgcatctcatataatttagctataacattgtttgcaacttcatttacattatagcctttagaagaaactaagtctaactggtaaatttcatttgaataagaattttgactcattaaagtgtcaaaagcctttttaggtactagggaagtagtaaattgcatatcttggtaacctccaaagaatcctccagcttggttttgctgagaatcatctaatacccctattatttcaaatatagttccatttatgttgataccatgacctaaggcatcttctggattttcaaaaatttcacttgtactttgtaatgtaagtaaaattacttttcttttttcatcatctaaagaaaaatctctaccacaaattaaatttattttagaatctttttttactggtccaacatcaacatacgtagtttttttatcaaaagatgcttgtgaagagtaaactgaatcaaggttaaacccatctcttgaaggagctattctttctactccttcaacaaatgataattcttctaaatcttttgcattaaagggttttaaaaaaatactcatatcatcagtaagacctgtgttatcggctgattcaaacgaaatagtagttttattagggtttacattgtttacagatttcttaatttctttttgaaatccattacctatagaactaacaagtattactgaagttattcctattataatccagagtaaagctacaaatacacgaagcttgtgaccttttaaattggccaaagaattttttaataaactcatgattacacctccgaagtaaacacaccatctttaagtcgtataaccttagttgcatacttagttaaatcttgatcatgtgtaaccattattatagtcttaccttgtttgttgagccttgttaaaagctccataatttctctgctagtttcactatctaatgccccagtcggttcatcagcaaagattatctgagggtcatttactaggcaacgtgcaatggctacacgctgttgttgaccaccagataattgaagtggtttctgcttaagcttgtccaaaagcccaacagaacttaatttatctttaacaatttcttctctattagatttttttagtgctttattgtaaattagaggcaactctacattttgatatacatttagagtttctattaaattaaattgttggaaaacaaatccaatattaatatttctaaaaacagaacgttcattttcactcaaattagttacatctgttccatcaaatatatatcttccttcatcaaatacatctagaaaacctaagatattaagtaaagtagttttaccactaccagacttacccattatcatgacaaattctccagattcaatttctaaatttaaggattttaaaacatgtaattcatctttccctactttgtaatatttttgaatattttctaatttaattaacatatgtaaattaattcacatccatagtaacttcttctacttttttgtttggagtagtatctccattattagaaccagcagttacgccatcgccttgaactgggtctccttctttcatttctttagtagggtgttttattattatatcgccttgttcaagaccgcctctaactacagcaaaatcatcattttgacttgctacatctacaatttgctttttcaatataccatctaaatccttaaatacatatgagtgtttgttgtctttaagtacacaagatgctggtattttaaagcttgaattagctacttcaagtgatgcttgaagatggaatccatttactaatccttcttgattatcaaatgctatgtttatatcataataagatagtgtattctgctgagctcccatttcagtatttggagtagatggtttatcagatataaaacttattctaccagtaagcttttggtcagttgaaaaaactagtatattgaccatttggtcaatcttcattttaggtaaatcttgttcacttgcttgtcctttcatataaaactctagaccttgaatagtcataaatgaaactggttggtctggatttccagtttggtcattcaagtatactgtgccatcaaaaggagcagtaactctgtcataagcttttttatccagagaagctatctgagagtttaaagcagttatctgtgcatttatagaagcaatagcatctttattttcagcaatatcagaaagtgatattttttgttttttgtattgactaagttgtgattttaaactatctatttctgctattatagttggatttttagcagtaaaaagaaggtctccttgatttactttttgaccatttgtaacattaacatcacttaactcataatctccagatatattgaagtccttagtttgcttaggaacaaccatcccatttataaatattttttcattttcaggaatagtatatgtttcgataaaattttcattagcttgtaattcagtgtttttcgaatcaacataagcaagaactcctagaattaaaagtatgattactgctattcctgcatatattttgaatctcttatttttaaagggattgtttttaaaacctttatttttagacttgaagccactacttccaaaactgctatttctaaagttgttacttttaaaactgttatttctaaatcttttatttttaaatttttttagaaaagacatgtcttcctcctttttataaaaactacttaattatatactgggatgtacatatagaattactataagaagttgaatataagttaatgaaaataaactatcaataataagatactataaatcacatttgaatgtaatagtaaattttgtatattggttgtactctgaatctacatcaattttatgaccaagcttatcacaaagttcttttactaaataaagcccaagacctgtagatttagaattgtttcttccattattacctgtaaatcccttattgaatattcgatttaaatcttccttttttataccacaaccagtatcttccactcttaattgtaaataatttttggttcttttgcaatagatagatatattatctcctaatgaggagtattttagggaattactcaataattgctcgaatatgaagtatagccatttttcatcagataaaaccttaaaattcaaattatttaagtctaaaataattttttttgaaataaaatattttgagtatttttttataatatttctaatgattttttcaatatttacctcttgaattaaaaaatccttatgaaaatcttcgagtcttgataaatataaaattttttcaacggagttttcaattctaaatatttcactatctatgtcatctgaaattttttcattaattaaattttcattttgttcaagaatgagttttattatagctataggtatctttacatcgtgtacccacatatttaaaatctctttgttttcttcaaatttctcgatattattatttattatgttattacattgatattgatgatttttaataatgttcaagtatattttttcttcatttttacatctagctaattctatatcattcatattaattttgaatgtatcattttttatcttatctaaaaatttgttcttcttgatgtagctaataaatagatataaaaataaaaacacaacatttacaactaatatatataaaatagtatcagtcagaaaaacatctacaggagaaaatataataactgatactgtaaaaattaagaaagtaaaattgtatactaaaaaacctagtttatccttgagaaaatctttaaagctcataaattcacctacttagaattgttttaactgattatataacccaatcctctttttgtttctataaaatcttctaaaccaatttcatttaattttgagcgtattctatttacattgacagttaatgtattatcatctacaaaccaatcattatcccataattttttcatgagtttattcctacttactatctgccccttatatttcataagctcatgaagaattttgatttcattttttgttagctcaatagtattatcttcatagtttattgttgcagttgataaatctaaagtaacaccattgtgaataatctgatttgagttattatcaacaaaattataagttcttcttaaaagggcattaactttagctactaagacatctacagaaaaaggtttttgtatataatcatctgcacctaaatttacacccattattacatccatattagaatttcttgaagaaataaaaattataggaacttttgaaatttttcttatttcattacaccaatgaaaaccatcataaaatggaaggtttatgtccaataaaactaattctgggttatagtttttgaactcttctattatattttcaagattttctatttgatgaacatcatgtccccatttagtaagacactttgctatgatatttttcaatgagacgtcatcttcaactaccattattttaaacattcttacctcctaattcaaaatagttatattaacataactatattctacttgataaattaaaatatttctaccttattacctaaaataattatattaatataactatattttacttgataaattatattttaaacataattgcaataaatttgaagaaatataattaatacttacgaaaatgtaaccttaaattaatataattaaatgtttaaaagccattttaatatatataatatatttgtgagaattgataaataactaattgtgatgaaaggtgattattaactatggaagaaatattatctgttgaaaatataaaaaaggagtatggaagaaaaggttcaaaacatgaagctctaaaaggaataactttcaaggtttataaaggagaatttgttggtattatggggtcttccggtgctggtaaatcaacacttttaaatattatttctacaatggatttaccttcatcaggagatatttatataaatggaaagaatactattaaaatgaagcaaaatgaattggcagattttagacgtgataatctaggctttgtatttcaagattctaatcttttggatacacttacaataaaagaaaatataatgttgcctctttctttaaaaaatgaaagagtatcagtaatagaaaatagaataaaagagatttcaaaagaattaaatatagaatctatattagataaatatcctggcgaagtttctggtggacaaaagcaaagaggagctgtatgtagagctatagcaacaaaaccatcattagtacttgcagatgagcctacaggagcattagattctaaatctgctagggatttgttgaattgtctattaaaattaaacaaagacagcaataaaacaatattgatggtaactcatgatgctataagtgcgagtttttgcaatagaatactctttataaaggatggaataatattcacagaaattgtaaagggagaaagtaacagagagttctataataaaatagtaaatacagtttccttaattggaggagttaataaaaatgactttatttagaattgcaatgcaaaatgtaaagaatagtttttttaattatttaatgtactttatttcaattgtatttagtgtatttgtattttttagttttaaatctatagagtataatgaagcgttgagttcacttggagaaaaaactaggatgagtattaatacaagttcaattgtaatagtggtatttgtatttttatttatatattattcaaactcattttttttcaatagacgtaggcgagaagtaggaacttatagtttacttggaatgaggaaaaatcagataggaaaaatatttttatatgaaacttttttgatgggtatagttgcaatactaataggtatatttttaggactgttattttcaaagcttatgactatgatgcttgtaaaattaatgaatgaaatgatagtagtaaatatgaacttaagtataaaggccttagttaagacactagcggtatttttaataatatttatagttattggaataagaaatactatagttatcagaaataagagaattatagagttatttaataaatatccagaaaagtataagtttaaaaaatttataaagttaaaatgtgtacttggtgttttattaatagctatttcttatttaatgtcaattagttattttattgctgaaaatattatgctttcagtttttatattagttacaataatacctggaacttttttatttttttcatcaactatgtatatgattattgatgctgttaagaagagaaaaagtttttattataagggacagaatttaattgcattttctgaacttggatttaaattaaagagcaatagtagtgtattggctgtaatagcaatattaatagctacgagtgtaactatgctagggtttaccatatcactttattacgatatagataggaacataagtgaaaattataaatacagttataccataaatttaggaaattcttatgtaaataacgaaattgacaaattattatataaatataaaaaagataataagataatctttgataaaacaatagaacttatagacaaagatataaatattgaaatgtattataaaaatggaaatagttatatagaagatagaacttctgtagatattattagagaaagtgattttaaaaaattaagacaatatcagaataacaattatgaagaattaacttcaaaggaatctgtgtactatgtttctgattcatacaaaaaaatgttttttaaagactttgagattgaaaaaataaacttgtatattaaagatacaaatgagtatgatataaatctgtttaaggtacaaaaaagcatcttggagccagaaataaattcacaagctacgtttgatttaattgtagtaaaagatgacgtatttaatcagttaaaattacatggaaattctagattaataagattaattgatataaaaaatgaaaaaaaagaactggatttgactttaaaatttaaaaatatagtaagtgaaaatatgaaatttacttatccttttaattttacatcaagtattgaaagttataataacttgataaaattaagtggtctaatgctgtttataggcatatttttgtctgtagtatttcttttatgtacaggtagtataatcttatttaaacaattatcaaatatatatgatgataaggaaagatatattatgttaataaaacttggagcaaataataaagatattgagaaaataatatcaaaacagttaaaaattatatttttaatgccattagttgtaggtacagttcataatttatttgctatgtctatagcacaaaagtttataccaaggtcattacttgtaccaattatcataactctagtcatttattttataggatattttatatattattttttaactttaaaatatgctctaaacatgataaaagaataaattatttttaagtcaaaagaattagatatatgttttgaataaaataacttatttaagtgcagatagaaaatactagaattgagtttaagatatttatttaaagataaaattaaagttaggaaaaagtctatattttatatcattttgtatcagttacattacttgatgttatataataaatctaagcagaatatcaaataaaaaatgacgaggagctgaaatttatgaagtttaatgcctaccaacataaatactcatcaataagaaatgtcgtgtatgctaaaaatggagcagttgcaacatcaacaccattagcatctcaagctggacttgaaatactaaaaaagggtggaaatgctgttgatgcagcagttgcaacagccgccacattagcagtagtagaacctacaagcaatgggattggaggagatgcatatgcccttgtttggatagaggaagaaaaacgattgtatggtttaaattctagtggctttgctccagaaaatatggaattaaaaaattataataatatgaaagaaatgccaaaatatgggtttggagcagtaactgtacctggaatacccgcagcttggtcagaattaaataaaaaatatggtaaacttagcttaatggaatgcttatctccagcgataaactatgcaagagagggatacgtagtatctcctaatgtagctaaggtatggaaaaaatcatatgaactctatgaaaaagaacttattggagaagagttcaaaccatggtttgatacattttctaaagatggtaaagctccagaggctggagatatatttatatgtgaagaacaggcaagtacattagaagagatagcaaatactcaggctgaaagcttttatagaggaagacttgctgataaaatagatgaatattctaaaaaatttaatggggctataagaaagagtgacttagagtgtttttatccaacatgggtagaacctataagtacagaatataagggatataaaatatttgaaatcccaccaaatggtcatggaataacagttttaatggcacttaacatattaaaagaattggaattagaaggaaatatagaaaatgtagaagacatacataaaattatagagagtttaaaattagcttttgcagattctaaaacatatgtaactgatatagagcatatgaaggtaaagattcaggaattactaagccaagagtatgccaaaaaaagaagtttattaattgacaataaagaggctttgtatccaactgcaggagagccatattgtggtggtacagtatacctttgtactgcagataaggatggaaatatggtttcatatatacagagcaattacataaattttggttcaggaattgtgataccaagaactgggattgctttacatagtagaggaaataattttaatttagaccctaaacaccacaatgtagtaaaaccatttaaaaaaccttatcatactataatacctggatttttaggtaaagaagataaagcaataggtccatttggtgtaatgggagcttttatgcaaccacaaggacatattcaagtgttaacaaatatgattgattttggattaaatccacaagaggcgctagatgctccaagatggcagtggataaaaggaaaggaaatagaagttgaaccagagatgccaaagcatataatagattcattaattgaaaagggtcatgaaataaaagtaattcatgatactgtcgacatgggacgaggtcaaataatatttaaaacagaacaggaaagttatatttgtgggacggaatcaagatgtgatggtcatattgcagtttattaatattatcaactaaaatatatataataaatttaaagagtatatgaaataattagtaaaggcgaaagtctacaatgactgacgcctttacaaaatttaagctatcatatgctgattttatatagattatgagccttattcttgaccagttttgatttcattgtcatcataactaatccagtcactaaagctaccaatataaatcttgtgaggtatatccagttctctaagagcaagactgttaacacaagcagatatccctgaaccacaagataaaattacttcatcataattatttaaatctttaaagaatttttttaaaaattctatatctttaagtgagccattttcaaagtcactttttattaaatccttacaaaaataattttttgcacttggtatatgaccagcttttgagtaagcaggttcaactaaaccctggtatctctcattagcacggcaatctattattacagtatcttttttgtataatttagacttaacatattccattggaacaactaaatcattgtttatatttggtctaatttccttacctgtacaacttggtatattcactttctcttccaattctccaccttcctttacgaaagatgttattcccccatctagtacatagacatttttaagccccaaatgttttaattggaaaaataatctgcaagctccatttaaatctccatcatcataagttacaatcgtagtgtcattatcaacacccattttttctaatttttcttttagtattaaagggtcttgtaaaggatttttaccaccatgttcttttgtaggagatgataaatccttgtctatatctaagataaaactgcctttgatatgtccttttttataagaatcaataccataagttctattgataagatcaaatctgcaatctattacaactagattatcatttttttctagttttgatataagttcttttgctgaaataatgtttttcaaagaatgtacctcctatgtttatattatctttattttaatttatattaattattaactttataaactaatattattataatttattacataagtaaataaatctttagaaattgtaaaaattttatataaaaattcaaataattaatgaatattgaaaattttagatatataataaaataagagtatattttatataatatgaaagctggtattgcaatagattaaagccttatacacgtttagtttttaaagaaattagtgttattatgaaaacctaagttaatttattaaataaataattgaataaaaaaattttattatgtatttataaaatttttgttacaaatttggcataatatagtatactttaagtgtgtattaggttaaatctataacaaattagacgtatgatatagacttagtgtttattggcatttacaagaaatttgttaatatcaactatttgtagtttgggcagttataattactataggggggatgtccaatacaaaacaatcaaccaagaactaatattatattataaagagttatagttttgtgtgtttatgtttttaattaaatttaaagtgggaaaaatatatttgttagaatggagaatagcgagatgagtaataaaatagttagtaagagacaattaacagatagtatttatttaatggaaatagaggcacctagagttgcaaaatcttctcaaccaggtcaatttataataattaaaaatgatgaaaagggagagaggattcctcttacaatagctgactatgatagagaaaaaggaacagtaactattgtattccaaacagttggtgcttcaactaaaaagttagcaatgtttgaagaaaacgattttgtaatggattttgtagggccattaggacaagcaagtgaatttatacatgaagatatagaagaattaagaaataaaaagatattatttgtagctggtggagttggttctgctccagtttatccacaagttaaatggtttaaagagcatggattagatgtagatgtaataattggtgcaagaactaaagaattaattatattagaagatgatatgaaaaaagtagctaaaaatgtatatgtatcaacagatgatggtacatatggatttaatggaagagttacagacctattaaaagatttagttgataatcaaggtaaaaaatatgaccaagcaatagtaattggaccaatgataatgatgaaatttatgtgccaattaactaaagaactaaatatacctactatagtaagtttaaatacaataatgatagatggaacaggtatgtgtggtggttgtagagttagtgttggaaatgaaactaagtttgcatgtgtagatggtcctgaatttgatggtcatttagttgattttgatcaagcaatgagaagacagtctatgtacaagactcaagagggaagagctattctaaaacttgaagaaggcgatagtcatcatcatagtaattgtggatgtggaggtaacaaataatggatgctaaaaaagtaaaagtaccagttagagaacaagaacctgctgtgagagcaacaaattttgatgaagtatgcttagggtataataaagaagaagctatggcagaagctaatagatgtttagcttgtaaaaaaccaaaatgtgtgggtggatgtccagtaggaatcgacataccagggtttataacaaaaattaaagaagatgatatagaaggtgctgctaaagtaatagctaagagcagttcattaccagctgtttgtggtagagtatgcccacaagaaagtcaatgtgaaggtgtatgtatacttggaataaaatcagatgctgtatcaataggtaaattagaaagatttgtagcagattggtcaaaagaaaatgacataaatttatctgatacagagcctaagaaaaatcaaaaagtagcagtaataggaagtggtccagcaggtctagcttgtgctggtgatttagctaaaaaaggctatgatgtaacaatctttgaagcaatgcatgagccaggtggagttttaacttacggaatacctgagtttagacttccaaaacaagctgttgttcaacctgaaatagacaatataagaaaattaggtgtaaaaatagaaactaatgtaattgttggtaaaacaattacagtagatgaacttatagaagatgaaggatttgaagctatattcataggttcaggagctggtcttccaatgtttatgaatataccaggggaaaatgcaaatggagtgttttctgcaaatgagtttttaactagagtaaacttaatgaaggcttatagagatgactatgatacacctattagttctggtaaaaaagttgctgtagtaggtggtggaaatgttgctatggacgctgctagaactgcattaagattaggttcagaatcatatatagtttatagaagaagtgaaaaagagcttccagcaagagctgaagaagttcatcatgcaaaagaagaaggcattatatttaatacattaacaaatcctaaggaaattttagtagatgaaaatggatatgttaaaggtatggtttgtataagaatggaattaggagagccagatgattctggaagaagaagacctatagaaatagaaggttctgaatttgtacttgatgtagacacagttataatgtcacttggaacaagcccaaatccactaatatcttctacaacaaagagtcttaatataaataagaagagatgcttaataacagatgaaaatggtcagacttctaaagagggtgtatttgcaggtggagatgctgttactggagcagcaacagtaatatctgcaatgggtgctggtaaaacagcagcagcatcaatagatgaatatttaaaaacaaaagttaatgcttaatttgtaaattaaagagagggtgtctcaaaatgaactttttagttcatgaggcactttttttgtacaaaatcaaatatgttttaatcatttcaacaatgaaaatttcattcctgtagaaagtctaacttttaagtcttagtacaatctctattttgatgtaggcacttttttagatggtttaataatttatcagttattattgtaatatttgatactaagtaacataactttgtctaactatgataaaatagttatacaataaaggtcttgtaaggagtgaataatgtgtggctaataaaatcagatttgtcaaatctaacattaaataatagaaaaataaattgtgtaattaatggtattttaatatgaaaaaaagagaaaaagtatttgatgggctagtttttaagcatatattaatcttattaatactattagttttgattgatttaacaagtaccatcatatatgcaagtaactctatggaaattacttctagaaatatgattgaggcatcaaaaagagaacttgaaaactatttagaagtaaacatatctttattaaaagctcttagtcaagatgatagattttctaatggtgaaacatcactaattgaaaagggaaaattattaaggccatatcaaaaggaatataatctttttatgattggtataacagatacaaaaggaaatgcttcaagtacatatagggaaaatgttaactcaataaaagataagcctagttttgagaaagcaattaaaacaaagcaagtagtagtttcagatattgaagtcagtaatgtaacaggtgacaaagtatttatcatatatgtaccaattgtaaaaaataatgagatgattgggaccatttttgcttctttttattttcaagatgtaaataatttaataagtagaagcaattttgatgattctattaaatttctaatgatagataaagattatactattatttctcatccaaacaaaaaatatgtaaatgataaaagtaagatgcttgatttagaagggaatattataggaaccactaaaagtgaaatcttaaaaaatataaataaaaaatgtcaaggtgattttttatcttgggataattggagattatataatgtaaaatatacgaacataaagtggactaattggactttagtatcaaaatgtaatatatttaagaactttaaaaatctaatagttaattttatgataaagttgtatttttatatagtaatatttatgatattgtggaaattaagtaatgctaaattaatagaacaacttaaaaaattggcttattatgattctttaagtggaataaaaaataaagaaaagtttagaaaagattctatgtatattttaaagaattattatcaagataatttttacttagtacaattggatgtcaataaatttaaatatataaatgagatgtttggatatgctgaagggaataagatattaattcatatatcacaggttttaaataataatacaaataaatatgaaatttgtgctaggatggataatgaccattttatattgttgattgcttgtaatactgaagatgaacttttaaatagattatctaaaataaataaagaaatttgtaacttaaatactactaactcatctaagtataaaattgttatgtcaagcggaatatataagattactaaaaaggatgatattaaaaagattgacctgttaattgatagagcaaatattgcagcaaaaagtaaaaaggaaaaatatgaacattcatattcgttttttaatgaagatacaagaaatcgattgtacaaggaaaaacgattggaagataatatgaataaagctttagaaaaaggtgaatttatagtatattatcaacctaagtatagtttagatgatgtaaatgaaattgaaggagcagaagccttgataagatggaatagtccagaatttgggtttatttcacctatagattttgtacctttatttgaaaagaatggttttattgtaaatattgatatgttcgtgtttgaagaagtatgcaaaacattaaacaagtggataaataaagggtatactcctgtaccaatctctgtaaatatgtctagagttcatttatatagggataattttatagaaaatataactgatttgataagtaaatacaatatatctcctgagtttattgaacttgaactaacagaaagtgttgtgtttgataatttaaatatattgattgatataatgaaaaagattaaagagataggattccttatatcaatggatgattttggttcgggatattcatctttaaatctgttaaaagacctttcttttgatattttaaaattagatagaggatttttaatcgaaacaacagatacaaaacgtggaaaaattattatttctaagattgtggaaatggcaaaagcgattgatattaaagtaatctgtgagggcgtagaaacttatgaacaagtagagttcttgaaagagataggttgtgataaggttcaaggatacttatttgctaaacctatggtattagatgaatttgaaaaacacttaaactttaaatttgattaatcattaataattattagactataatataccctaacaacttacttacaaatatgtaagttaattgttagggtatttttatggttaaagtagtatattcacgatattatggtattgtagtaaaaataaaaaattatggagaatataaaatgaacatattgagtattagaaatatatcaaaaacatattgcggaaatattccatttaaagcattagataaggttagtctaaatatagaaaagggagaatttgtgtctgttatgggaccatctggaagtggtaaatctactcttttaaatataatatctacagttgatagacagagtgaaggtgaggttgtattagatggatatgatgtaagtaaattgaaaggagaaaaacttgctgaatttagaaggaaacaacttggttttgtatttcaggattttaatttgattgacactttaactgttggcgaaaatattatgttgccacttacactagagggggcaagtatcaaagatatgaatatacaaactaaaagtatatctaaatttttaggaatagataaaattttagatagaaaaacctatgaaatttcaggaggtcaagctcaaaggtgtgctattgctagagctattataaataaacctaccatacttcttgcagatgagccaactggaaatcttgattcaaaatctactgatgatgttttgaaattatttactaggataaacaaagaacaaaatgtaacaacacttatggtaactcatgaagtatatagtgcaagttattcagatagagtaatttttataaaagatggttgtatatatacagaaataaaaaaatctgaaagcagtaattctttctattctgatatactagctgttttgtctcaaataggaggtgtaagatagtggattttagaaagtttgcttataataatatagttagaaatttcagggcatatttagcatattttttaagttctgttttttctataatgatattttttgtttttgcagtgtctatgttccatccgattataacaaaatctggaatgcagagtggttctactgcatttatggctcttatgacttcagaattaacaatattaggttttagtctactttttatattgtactctttaggaaatttcttgaaatatagattgaaagattttggagtattgatgataattggaatgagcaacagacaactgaaaaaattgatattaattgaaaatttgataataggatttttagcagtgatgttaggaatattacttggtttatcaatttcaaaattgtttttattgtatttaagcaaactgttttatatgaatttaactgaaatttattttccagtaaaagcaatactattgactattgtatcatttatgattttatttttgataacaggaccaatgagcttaaaattattgagaaaaaagagtattttagagcttttagtaggtacaaaaaagcctaaaaaagagataaaatcttcaaggctatttggaataattggtgtaatatgtcttatattaggatatgctatgatactatttggcaataagttaaaaataaatggaggtatgtatacaacagcactattaattactttggggatatttttatttttttctcaatttactattttgatattaaagtatttaaaaaataaagaaaaattttataagaacaaagtaaatatgttacttataagtaatttgatatataaattaaaggataatacacgattgttatttttaataacaatacttttatcggctactttagtagcatttacaacaacttcaacacttgtaagttctcaaggagaagcttctaaaaataatttcccaatggtttactcatatttttcagagcataataatgaaaaagaatatgaagaactacaacaaattagagaagcaatcaaaggatatgattataaggagttaagttttcctgtacttaaatataatagggaagtcttactaagtgtaaagaattataacaaattatcaaaggaattgggattagataaaattagttcaaagttagaaaaatatgaagggattataattcctagtagcaattcacaagaacatataaattctttaaaacaattaaaaaattatagtataaaaaatttaaatatagaagtaaaaaaatcaaaaaataaaataatttttcctacaggactgtttagtaaagttgtagttataagtgatgacttatacgatgaagtaaaaggtgaattttcaaaaattaattttcatggatttgattataaaaactggcaaagcagtgcaaagataactgaaaatttaaaagaaaaacattttaatttggatagagaatataacaggtcatattttttaacattaccagatatgtatttagtagagttacaacaaagtaaaattcttcaatttatgggtgtttttataggagtgatattatttatagcagtttttagttttttatacttcagattatatacagacgagatagaagataatgtaaagtacaaaaaactatcaaaaataggtctatcttttaaaaatatgaataagattgttagtatagagataggtacattgttttttataccgtattttatagcaattataaatagcataatttctttactgtttttaaatcaagtattaaataatagttttaggttagaaaatttgggtatattactactgatatcatctatatattcactttatttttacttattaaaaaaaatttatactagaaaagtttggttttttgattaaagtggtatataatagatatataaattaatatttaaaaagtagttaatattaggggagggcatttgcacctcccttgtaatatgtggaaaattgaatattagaagaaggaggagacttgatggaaaatcaacaattattaggaacagaacgaattagtaaattactactaaaatattctataccagctataataggtatgttggtaaatagtttatataatgtagtagatagaatttttattggaaatataccaggggttggaccacttgcaataacaggtcttggtgtaacaatgccaataatgacaataatacttgcatttgggatgttgataggtataggaactactactaccatatcaataaaacttgggcaaggtaaagtagaagaggcaagaaaacttataggaaatgcaatgacgttatctgtaataacaggaattatcataatgatacttggaatattatttgcaaataaaatacttacattgtttggagcaagtgaaaatactttaatatatgcaaaatcatatataaatattatattattaggtacagtagtaaatcttctttccttttctttaaaccactcaataagagctgatggtagtcctaaaatttcagcaggaataatgatagtaggatgtttaactaatatagttttagactggatattaatatttggattcaatttgggaatacaaggagctgcaattgctacagtaacttctcaggctcttacagctattttaactatagggtattatataagtggaaaatcaaacttacgattcagtaaatctaatctaaaattagataaaaagctaataaaagcagtgtttgcaataggtatgtcgccatttgcgatgcaacttgcagcaagtttagttcaagtaatatcaaatattgcacttaaaactcatggtggagatttagctataggggctatggctactatttcttccattgcaatggtatttttgatgcctatctttggaataaatcaaggagcgcaacctattataggtttcaattatggagctgaaaaatatgatagggttaaaaaagcatatttaggttcattagtagtagctactataattttatgtatgggtatggtagtagttatgcttttcccagaagctattataggtatatttaataaagaccctgaacttatgaatatatctgttaatggattaagaatatacttacttatgttgccaattgtaggcttatcagttacaggaacaaactttatacaatctataggaaaagcaaaaatggctatgttattgagccttttaagacaagtaattttattgataccagcagtattaattcttcctacattcttaggtttacagggtgtatggacagctcaaccagtgtctgattttatagctacagtaattacaggtatagttgtatttagagaattaaaaagatatactcctaaaactgaaaaattaaatgaaaatgaaagactaaatgagataactactgagtaaaaatataaattcagataattgagcaagaaattgcaaaaaatacgattatatgataaaataaaaccgctgtcaaggataagagaaattctaattatggagtgattttatggaatttacaaagaaaagcaaattaaaaaatatgtatgtaaacatgaatgtagctagaatgttgtctaagataaatgagtataagggtaggcaactgctttacaaaaaacaaccaaaagaaattttagaaaacctagaaaaaaaatctttagtagattgttctgaatctacatacattggaaatcaaagagatagtagtaattttaatctagaaaagttgataagtaatgaagttacacctagaagtagagaggaattgagtattgttgaatacagagatgtggtaaaaactattaacagtgcttatgagagtattcccatcagttcacaaacgattcttgagcttcatgggtacttatataaattttcatctactagaggaggaagttataagtcagataatgattttattgaacacaatttaaaacctagcgaatttataagtattgattcaagtgtcaataaagttgaaaaagctgtagaagaaatatgtgaagcttataatacattgatagaggaagatgaaattgatatattaatattaatttctgcatttgtgttagatttcatattgatacatccattcaaagaaggtaatataaaaatggcgagagtacttatcctattgttactaaataaaaatgggtatgaagttggaagatatataagtttaggaaagatatttgatgatagttcatatgaatattatagtaatttaaattatttgaaagcctcaataggtagtgaaaaagcagatatgaatgcatggattgagtattttttagagacgatattaactgcatatgagaagctggatgatagtttaaatatatctgataagaaaagacaaacaaaaactagtagaatagaaaaaataataaattctacccttggatattttacaaaagaagatataagagatttatgtcctgacattccagaacctactataaatagagtttttaataatctaagaaaacaagataagatagaagttgttgcaagaggaagaagtgcaaaatggaagaaaaaatattaaaaaatgtttaaataactaaaatggtatagtgttttacactataccatttttaatgtcattagcatgagcaataatttaacaacttaagcaatatcaattttatttattgattatttttgaactgaaaaatggggttatatggtatactacaataataattaattttggatgagaatatataacgttacagaatatcttaggagtatatgtataaaaaatataataaaagtgtgaggtttagtaattaacaaattatgtggcttcacacttttttataaaataaaaatacttagcagaagaatattttagttgatatgtttataagatagtacttgtttgggtaaaagtataaatagtaaaaaagtagaagtaatgtgtataaaaacataagttacattctgtaataatagttattttataattcaacaaaagaatagaatgggtatatttgtgaaataataatataaaataatcttaggagtgatcttatgaagaaaaaattattatatataaatgtaaattcaaaacctgaagacttatcttcaagtaaaactgtagcaagaaaatttataaataaatttatggaaaaaaacaaagattttgaggttgaagagatagacctttataaagaacatataccgagacttgagtatcagtactttgaaaaaagaaatagcatagttagtgaagaaaatgctaaaaatttagacgataaggatagaaaagagcttacaaagattagaaatctttgtgaccaatttgtgagtgcaagtgtttatgtaatagcagcacctatgtggagtttatcttttccagcaccacttaaagagtatatagattgtataattcaagatggaaaaactatatcttttgaaggcaatgataaaccacaaggaattttaaatgatattgatagaagtatggtatatatacaatcttctggtggacacataccatgggtcttgaagccagttatgaataaagggttaaattatgtggaaagtattatgaaatttataggaattaaaaaatttgatgaattgttagtagatggaactggaactagtgaagaagaaagacaagctgcaatagaaaaagcatctgaaaaaatacatggtataatagatggtatgaaattttaattataatattttattaaaaatataaaggaaaaacctcttttaatgtagaaacttatattgaaggaggcgagaatcatgcgagaagaaaaaagtaatgaaaagtatgattgttattggtgtaatcaagaaaataatttctgtgtagaaataaaagataatatagtaatgatagatgatggcactggtacgttaaaacaagccgttttcatagggtataaacaaatccaaattaatttaaattgttcacattgtcaaaacttaaatagaataaaattaaatttgtagaattttaaaatggaaattattgaaggaattaaaaatagaaagtgttaatatttagactgaaaattatattttatacaataaaagtttatttaaataacattgtattttaatatttattttcagtcttactttattaaaattattttttggttatgtctggaaaatatctgtctactaatttttctgaaatattttttaattggtcagccattgaagtcagacttaataaggctatcaataaatcatctttattttctggatttatactaatattttcaaaattagactctataaagtccggtatattctttctttgattttcttttattaacatgaatttttcgtaacatgaaactaaatctttttcactgaaattatccttttcatacacaccatgtaagattcttttaatttcttgtattgtaagtgtatttttcatagaataaataattatcatctgtaaaatttgttctttagtatacttttttcccttaactggtttgattaatccctctttgctgtaattatttatcatggttttagtaagaattttatcactttcaaatcttttattaggagaaagtttattgtcaattagagaaataatttgatccatatataagtcaatagagggaatatcgtttgaagttatatctgcattatttagtgtttctagtattatagtattaagttcattattcatcatatgttacctccataatatatataatacactaaattagaaagtaaaacaatattaagacttgtaaaaaaaacataaagtggtataattaaatatataatatagtaatgaaaactatatttatgaatctgatttttaaaatacataattgtaggaggacgaaatgtatcaattttttttaaagggtagagacccaataagcagtttaactcattttataggtgcttgtttatctcttttagcaactataattttagtttttcaatctgttacattacaggaaacttctctcttgatgatagtatctgtatcggtatttggactttcactaattgctttatatagtgcaagttcgtattatcattttttaaaggggacaccagaacaagaattgttttttagaaaagtagaccatgcaatgatttatgtattgattgctggctcttatacaccaatatgtctgaattttatggaaaaaaaagaaggcataatatttgttacagcaatatggatagttgcatttattggcataataataaaaatattttggatggatgcacctagatggttatctaccagtatatatttacttatggggtgggcaattgtttttgatataaatgcattcaattcaattcctaaggattgccttagactattaattatggaaggtgtatcttactctataggtgcaattatttatataattaaaaagcctaatataagtcctgagtttggatttcatgaaatatttcatatttttattatgataggttctttatttcactttttagcagttttattgtatgttttatagttttaaaagatttgattaattgatactaaaattctacaatgaataaaatggaactgccttatatagattatatcttcgacaataagacagttccttattataaatattaaattctacttataataaaattttgataaaaatagtccattcaaaatgcctattccataattcctttaatgtacttttcatttacgacatatagtttgaatttatgtactataattatatcctctaaattctctgaaacactaacaattctgacacatttgtttctaatttctacaggtaaatctaaatcatttgttaaattcacatagtcatcatatttatacataaaatcatccctttacattaagatatacttattatactatattttaataagtttttttaaattattacaatttttcccgaaatttcattttttatacataaaatttccaaattaggtaaagattaaattttttattgtataaacaaaatttacatataaaatattttattcaaatttttaaataactattgccaatttttgaaaaatatattattattaatagtaataaaaaactgtaaatttagaatattaataaaaattatttgggaggaaattatcatggtgagattaaatatagtaaaattaaatacaaaattaaatcatcaccatcatcatagattaaagggattgtaatatgaaattaattcatagacacaagccctgtttttagtgtaattggtcttgtatctatgatgggaagtaattttaggagaaaattatagccatataggtataaagcctatatggcttttttattgttttaaatttgcaaatataagagtaaatttaatgaagagggtgagaatgtgaaatttttgaggattgaagatgaagttatttattctaaaaaaagatataaattaaaaagggaaatagataaactttttttggatgaagaatattttcaaatagaaccacaattatttgaagaatatgatgaatttacaactataaataataaaattccagaagaatctatggtaaaggttgtaaatggaaaagtaatggtacttagagctgatataactacaagtataataaaaagccttgtaccaagatgggaagatggtttaaagcttaagcttttttataattcatcaatatataaaaataaaaatacagttggaataaaagagataagacaaataggttgcgagtatctaggagaagcctctgtagaagcagatagagaagtagtgaaattagctcttaagatacttgaaaaatacaataataattttattttagaggttgggagtagcaagtatattcatggtttgttagaagaattaaatttaaataagaattgtgaaaatcaaattaaaaatttactatatacgaagaacactcatgaattaaaagtatatattgaagaactgaaaattaagcgtgaagtaaaagagctattatcaaatattttaagcttgcaagggaatttatacaacgttattgaaaaatcaaacaagttctattgtaataataagatgaagcaagctcttgaagaattaaagcaagtaaataatttaattgaggaatgtaattttttagataaggctagatttgatttatcaatgattactatgcttgactattatgaaggaattatgtttagaggatactacccaaactcatataaagaaattcttagtggtggaagatatgattctttaactaaagagtatggaaaagaaattccagccattggatttacactaagtgttgatgagttaatgaagtatgtatataagtaaagtttagaaggagggattgctttggattatttgactatagcactagcaaaaggacgaattgaaggggaatcatttaaaaaatttaaaaaaatgggtctaggagatagtatagacacagatacgagaaaactaatttttaaagatgaagaaaataaaattatatatatacatgtaaagccatcagatgtagttacatatgttgaaaaaggagtcgctgaccttggtatagcaggtaaagatactattttagagaatgagacagatgtatatgaaatatatgatttaggttttggaaaatgtaaatttgctgtagcaggattaaagggagatagcatatatagagaagatgaatatctaaaagtggcaacaaagtatcccaatatagcaaaaaagtattttaaagagaaaggtcaaaaaattgaaataataaaattaaatggttctgtagaactagctccaatagtagggttgtcagatgtaattgtagatatagttgagactggcaatacacttaaagcaaatggtcttgaaatattagaagacatatgtaatataagtgctagaattatatcaaatagagctagctatagatttaaatatgaacaaattcagaatataattcgtttatttgaagaacttgataattaaaatataattgaactttataaggagggatttaagttgagagaaaaagaaagtataagagagttaaggggatatgaaccaaatcacgtaaactgtaaagtaaaacttgatgcaaatgaaggaagtaagaggttgtttaaataccttattaaagaaatttcagatagtgatatagatttaaatttatatcctgaagattcttatagtgatttgaaagaatctataatagattacataaatatttctggagtaaataagaaaaatcttctagtaggaaacggttcaagtgaaataattgatttaataatacatacttttgtagataaagatgaagtaatattgagtttctctccaagttttagtatgtattctatatatagtcagataaatgggtctaaatttataggtgttgaaagtgatgaaaatttagttataaatatagataatgtgattgaaaaagtaaaggagaataatcctaaaatagtaattgtatgtaatcctaataatccaactggaacaatattaaagagggaagagataataaagcttttagattcaactaatagtctagtggttttagatgaagcatatatggattttggagaagaaagcatgttaagtgatgtttttaagtatgataatctaatagttcttagaactttatcaaaggcatttggattggctggaataagaacaggatatatgttatctaatagtagtttaataaattctgttgagaaagtaagacctccatataatttaaattcattatcagactttattgctacaagagcacttagaaataaagatgtggtaaaggcttatataaaggaagtaaaagaggaaagagaagttttatatgaagaaatgattggtatgggaattaaagcatacaaatcacaagcaaattttatattattttattctgaaatcgaaaatttatcacaaaaacttattgatagaggagttttaataagaaaatttggtggaaagttagaaaattattacagagttacaattggtgataaagaagaaaattctatgtttgttggagctataagagatattttgaaaaaggagaaataggtatgagaatttggaaggtagaaagaaatacttttgaaacacagattttagtagaattaaatattgatggttctggtaaagctgaaatagatactggaataggatttttagaccatatgcttaccttaatgtcatttcatggcaagttcgatttaaaagtgatttgtaagggtgatacatatgtagatgaccaccatagtgtagaagatataggtatagctataggtgaagcatttaaaaatgcactaggtgacaaaaaaggaatacgaagatattctaatatctatatacctatggatgaatctctatcaatggtagcaatagatataagtaatagaccttatcttgtatttaatgctaaatttgatacccaaatgattggtagtatgagtactcaatgctttaaagaattttttagagcttttgtaaatgaatcgagagtaacattacatatcaatctcttatatggggaaaatgaccatcataagatagaaagtatttttaaagcatttgcaagagctttaaaagagggtagtgaaatagtttctaatgagatagcatcttcaaagggggttttgtagaatgaatataatagtagactatggtcttggaaatatagattctgtgtctaggggttttagaaaagctggaatagaaactaaaatttctagtgatatagatgaaataaaacaggcagattcacttatacttccaggtgttggagcttttagagattctataagtgccttagataaactaggattgataccaataataaaggagcatgtttctaagggtaaatttatgataggtatatgtctaggaatgcaattactttatgaaaaaagttatgagtatggagaatatgaaggattaggacttataaaaggaagtattgataaactggatataactttaaaagtgccacatatgggatggaataatctaaaatttaataaggcaaatgatgatatacttaaatatataaacgaagatgattatgtatacttcgttcactcatattatgcaaattcatcaaatgaagaactagttgcattttcagaatatgaaaagaaaatccctgctattgttagaaaaggcaatgtatatggtatacaatttcatcctgaaaaaagtggagaagtagggttaaatatattaagagcatatggggagatgataaaatgataatatttccagcaatagatataaaagataataagtgtgtaagactcacacaaggagaatttgacaaagtaaatgtatattatgataatccattagaagtagcatataaatggaaaaatgaaggagcagaatatatacatatagtagatttaaatggtgctagaagtgaatttggtataaatacaaaaataattgaggatatagcaaacaatatagatatacctattcaagttggtggtggagttagagataagggaaaagtcaaaagtttaataaatgctggtgttactagagtaatattaggtagtatagcgattgaaaatttgaatttggttgaagaattggtcaatgaatataaagagaaaattgtagtttctatagacgctaaagatggaaaagtagcagttaggggatgggaagttgtaagcgatgtagactcattaacattatgtaaacaacttgaaaagataggtgtacaaactattgtttatacagatatatcaaaagatgggatgttgcaagggccaaattttgacatatatgaaagaatagcaaaggaaacgtcattaaatgttattgcttctggaggcgtaacttctatagaagacgtaaaaagactaaaagctatgaacttatatggtgcaataataggtaaagcgctttatgataaaaagatagactttaaggaggcacaacaattatgcttactaggagaataataccttgtctagatgtgagaaatggaagagttgtaaagggaaaaaaatttaaagatatagtagatgttgatagtccagaagtacttggaaaattttatagtgattgtggtgcagatgaacttgtattctatgatataactgcatcaaatgaagagagaaagacatctttagaatttgtgacaaaagttgcagaaaatataaatataccattttgtgttggtggaggagtaaataaattagaagatttcactgatattttaagaaaaggtgctgataaggtttctataaattcatcagcagtcaaaaatcctgaattaataagggaagcttcattaaaatttggagcacaatgtgttgttttatcgatagatgcaaagaaaaatgaagagggttcatggagcgtatacgtaaaaggtggaagagaaaaaactaatctggatgcaattgaatgggctgttaaaggtgtagaacttggagcaggagaaattgttgtaaatagtatggacgaagatggaatgaaaaatggatatgatatagaattattatcaaagataacttctttagtaaatgtacctgtcatagcatctggaggcgctggaaaaaaggaagatttttatgaggcagttaataaatctaatgtagatggaattttagcagcatctgtttttcattttggcgagataaaaataaacgatttaaagaaatatttaaaaaacatgggtgtagaagtaagattataagttaaatactaaaaggagattagaaatatggataataagtgtaacaatgtatacagtgatgaagtagaggaatttataagaagtataaagtttgatgataaagggttagtccctgttgttgttcaagaggtagttagtaaagatgtactgatgttagcatatatgaataaagatgctataaagaaaaccttaaaagataaagtagcttgctattttagtagaagtagacaaaaactttgggttaaaggtgagacatctggtaatactcaaaaagtagttaagatgtcttatgattgtgatgtagatactatactactttttgttgaacaaactggtgtagcttgtcatacaggcaattattcttgtttttacagagacttgtttgatgatagttcaaaaatggagcctgaagtacaaacaaatatattgaaagaattatatgatttaatcaatgaaagaaaaaataatccagttgaaggttcttatactaattatctttttgaaaaaggaatagataagattcttaaaaaagtaggtgaagagagtagtgaggtaattatagcatcaaaaaataccgataaaagtgaacttatttacgaaattagcgatttagtgtatcatacattggttttaatgatagaaaaaggtgttgaaattgatgaaataaaaaaagaattacttaaaagaagaaaatagaataggatagattaatggtaataagaaaatataccgcttttaataaaaagtggtatattttttattttatattttcgatttatagaataatatttaaattacttgataaaattaactatatatataatttattgataaaataattgtagtacattatttattttagaaaaaagataattatctaattatatttaaggataataatatgaaaataatttttatattaaaaaatatgaatgaaaatagtaggttttataaaaaacatatttagattttaacatctaaaaggaattttcaaacctaatatttcatttttaaataaaaaaataaaatattagttttgatttatggtttaaattgggttataataaattgtcaaattatttattaatataaaatagactataaaacaagcaaaaatcatactattatataaaagaccttaaagatagaaaattacagaaagaagccaaaatgtttttgaaaaaaatgaaattttattgcaaaaaaatcaaaatcaatttaacttaatagttataatctatttttagtgttacaaatatacaatgtatattatacaatataaaaaatacgtttatttataaatattattatatttggatttttggtttttataatttttttatatttaaacataactaaaagtaaaagattacgaaagctaagtagagtttattttattttaataaataaaaaagctatttttctatatattggcataatatatgcttatttaactatgaaattaaaattaaataggattaatgaggaggaaaagaatgggaagtaatgaactgaaaaagactcttggcgtatcagcagcattatcaactgttgttggttctgttataggagcgggcgtattttttaaaccacaagcagtctatacattaactggaggagctccaggtcttggtatattggcatggttaatagctggaatcataactataacagctggtcttacagctgcagaagtatcagttgcgataccaaaaactggtggaatgatggtatatataaaagaaatttatggagacaaattaggttttttaactggatggatgcaaattgtattattttatccagggatgatggcagcattaggtgttatatttggagaacaagcatcagcactaattggtagcccatcacttttacttccaatagcaattggaattatagtaatagttgcagggcttaatatgttaggttcaaaaactggaggagtcatacaaactgtctctacaatttgtaagttaataccacttattttaataatggttgttggatttattaaaggtggtggaaataatccaatacttacacctatggttggtgaaggattaagcctgggtagtgtactaggtcaagttttaattgctatattatttgcttttgatggatggatgaatgttggtactttagctggagaaatgaagaatcctggaaaagaccttccaaaagctataataggtggattgtcagttgttatggctgtttattttataataaatttagcgtatctttgggtattaccagctaatgaattagcaaattatgcttctcctgcatcagcagttgctgaagttatatttggttcaatgggtggaaaaataatatctgtaggtatattaatttcagtgtttggagcattaaatggatttttactaactggttcaagggtggcatatactttagctacagataagactttaccaaagtatggtatattttctaaattaaattctgctcaagttccagcaaatgcaatagcattagtatctgttattgcatctatatatgctttgtcaggtcaatttaatttattaactgacttagctgtatttgctacttggatattctatgtattaacttttataggggttatgaaacttagaaagactcatccaaatataccaagagagtataaagttccattatatcctattgttcctataatagctatagcaagtggtatatttgttgtagttaatcaattgtgttttgcagggatgaaaactactatgatatctataggaggtcttgtaataacagctataggcttaccagtgtatgcttatatgactagaggaataaaaagataaaccaagtagtttacaaatgctttataattaaaataaaagagactgtctcaaaatagagataagtctcttttttattgttaaaagggtaaagagatgttttattttataaaaaaagagtgttctatgaactaaaaagtttattttaaggtattcactttatttttagtttttgaattataaaattaaacatctaaaaaattatttgctttaagatactttattttaaagtgtttttttttcaaactaagtgatatctatataacaaatattatacataggttttatgaaaattaaatctttctgttatataaaatagaatattgtattatatagaaaatattacctgatcaatatcgtgatttataaataagattagaaaattttatttgataacaaaaattagacaatatgaatatataatgtatgtattaaaaatgtggcaaatagttgttttggtatttattatttgtttaatatttctaatttataaaaaaaaaattataaattttaaaaattataaatgacattttaactagaattaattgtaaaaaacactatataatactcaattttcaacattctatacaattatacagaaattatacagcataataatcaccgaaataacaaattttaaaaattaagcaaaactttttgtcgaagttcaacgtctatatatatgtagtgtaaatttttgggataaaatactacaaaaatataaatgtaaaaatatagtaatattggaggtcgaacgatgagaaataaaaagaaaaaaataaatagaaagaagttgtatttgcttttaagtgctattgtagtgtgtctggcttttatagtagttggtgttcgcgtcagctctttaaatatgaaggaaaatgaaattagtagaaatgcaaaactgtcaagttctactattacagatatagtatctaatacatcaatagaagttagtaaagggccaagtaaaagttctggaaaaatagcatacataactatagatgatggcccatctaaatttactgacgagatgataaaaactttaaataaatacaatgttaaagcaactttttttatgatagatgggaatatgaaggaatatccacagcaagttaaaaatataattaaaaatgggaacacagcaggttttcatagtgtatcacatgatattcacaagctttatgttactagtacatcagcaaaagaggaatttgatacaaatgatcaaactttttataagataactggtaaacattcaaaagtaataagaataccttatggaagcaaaccatatacaccacaagcctcttatcaggctttagttgatgctggatataaaatttgggactgggacttagatacagaagattggagatctaattcttctcaaattgtacaaaatgtaaaaaatcatattaagaatagaaaaggtgaagataaagaccaacttgtagttttaatgcatgagaaaaaacagagtgcagaagctttagattcagttttaaaattcttatcagatgaaggttatgaatttgcgccagtagatcaaaaccaaataccaaaaaattattggttacgtaatttagagtagttaaaatataagaatattgattgatatttttagaaattgagaataaaaatgagtgaggtgtaggtatattgaataaaaaactttatataggaatggtcggaatattgtctttgatgatggttggttgtaataaaagtttagcaaaagtaaatgatgtggaaatcacaaaagaacagtacaaaaaaacaaaagcagttttatctgctactaataattatataaatgggcagtctttagatgaattagaaaaaactttggataaaaaaggtagaaataaattagaaaatgttataatatcgtttatggtggataatgaacttttatatcaagaggctaaggataaaggactaactccaagtaaaagtgaagtagactcaaaatatcaagaactagaagataagatgaatttgaatacaagctataaggaaaaaatggacaaagcaggtgttgataaagaatatttaaaacaagaaatatctagagatttagcaatagataaaaataaaaaggcctttgaagatagaataaacataagtgataatgatatggaagcctactatacaagtcataaaaaagattttaatgtagaagaagtaagtgcttctcagatacttatatcgactttagataaaaataaaaaagaagtaagcaaagataaaaaagaagctttgaagaagaaggcagataatatattgactaaaatcaaaaatggagaaagttttgaaagtttagctaaaaaatattcggatgataaagcaactggaaaaaatggaggacagctaggatattttacaaaggatgataaaaatgctgagtttacaaaggaagtgttcaaattaaagaaaaatgaagtttcaaatgtgtttgaaactagttatggatatcatatagtcaaagttactgataaaagagaaagacaaaaaagttttaatgagtgtcagagtttaataagagaatctattttaaatgaaaagtatattgagcatataaaaaaactgaatgaagatgctaaaatagacagatagaatttctaacagctcaatcctagcctgtaatcggagggagattttacaggaatgtttaagagtttaaagagaacgaaagttgagaaatacattatcgataataaagactctttttatagaatagcatatagttatacgaagaatgaagaagatgccttagatgtggttcaagaagccatgtataaggcactatactcagtggaaaatattaaagaagtaaattatataaagacatggttttataaaattttagttagaacgagtatagattttattagaaaaaaccgtaaatataataatatgacagatattgaccttatagatgagactggagagtatgataaatatactgatttggatttaagaagagctttggaagaattacctattgaatacaaatctattataatattaagattttttgaagatttaaagattgaagaagtagcaataatattggatgaaaatgtgaatactgttaaaactaggttatatactgctttaaaaaaactaaaattaaaaattgaagagtagggataaaaagaatgacaagcaaagaaaggttaaataagttaaaagatgagtatcataaaattccaatacccaagaaattagatactataataaatcatgaaaaaatagaaaacatatatcgagagaaaaataaaaaagtaaatagattaagatttaaagttgcaatagcctttgcatgtatatttacagtattagtaaatataagtcctgtatttgcagacaatttttctaagatacctgtaattggagtaatagtagaagtaataactataaaaaattatagtttaaaaagtgaaaattatgaagctgagattgatattcctaaaatacgaggtttaaaagataaaaacttagaacaaagattaaacagtagttttatggaagatggaaaaaggctttatcatcaattccaagagagaatggagaagatacaatcatcaaagaataaaggatataaatctttaagtttgagttatagtgtaaaaaataattctaaaaaatttctatcaatagagatgacaaaaaatgagatagaggcttcatcatatgtgagtaaggcacattatactattgataaaaaaagacaaatagttttgactttgccaatgctttttaaagatgataagtatataaaagttataagtgataatataaaagaacaaatgagagaacaaatgaaaaaggatagtacaaaatcctattttatagatcaaaaaaaagacttgcctgttgaagattttaaaacaattaataagtatcaggatttttattttaataaaaatgaagaccttgtaatttgttttgatgaatatgaagtagcacctggttatatgggtgcagttgagtttgtaataccatataaagtaataaaagatttgtaaattgaatagtagtttatatatacatattttaagaaggacaatatgactacatataaaaagcttaaaaaatctatatttaaaatttctatattttcaatatgcttattagtctcattagtagatataaaccctatatttgcaggtagttcctctaatgagacttcaaatagtgatacgataaaggtgttaaatgctaagagtctcaactttaaacaaggcaattatgaagtgaatgtgagtattcctaaaataaaaggtttaaaagataaaactttagagaataaattaaacaatgagtttttgcaagatgggaaaaaaatttacagtgaatttcaaaataaaatgaaaaaggaaaataataagggtcatagatacctaaatgtaatccataatgtcaaaaataattctaaggactttttatcaatagaaatgacaaaagaagagatagaagattcctcgtctataactaagaagcattacactgttgataaaaatagaggaatactattaaatttaccaatattttttaaagatagtagatatattagagctataagtgataatataaaagagcagatgagaaatcaaattaagaaagatgatacaaaatcttattttatagaccaagataaagacttcccagtgaaagattttgaatctataaataagtatcaagatttttattttaataaaaatggaaatcttgtgattagttttgaagaatatgaagtagtacctggttatatgggagcagtagaatttgtgataccaaataaagtaataaaaagactaagatagatatatagaagatttttagatagactggtaaggagaattatatgaatatatatgaacaagcaataagattaatagaaaataatgaagatttcgcatttgctacaataacgtctcattcaggttcaacaccacgtgaaactggagcaatgatgattgtgaaaaatgattctactatatttggttcagtaggaggaggtagtgtagaagcagaatgtataaaacatgcaattaatgttataaaaaatagagaatcaatgttgtataaatttactctaaacaaatctgatgtggcaaaactaggaatgatatgtggaggtactggagaaatacaaatagattttatagatagtaaattaaaaagtaatatagaaaaattcaataagagactaaaggaaaatacaagtaaagcatatatatttggtgcaggtcatatttcaagagatgttgctgtgatactatctcttttagaatttagaacagtagtaatagatgatagagaagaatttgctaattatgaaaggttcccagaatcagaagtagtagttttagattcttttgaaaatataccagattttccaactgacgaaaatagctatataattattttaacaagaggtcatctatatgattcaagtgctttagaatgggctcttaaaagagaaactggttatataggtatgattggaagtagaacaaaaattggattgacgtacgaaaaactcatgaaaaaaggttttaagaaggaagaattatcaaaagtacatgcaccaataggcataaaattgaatgctcaaacaccagctgaaatagctgtatgtatagctgctgaacttataaattgtagagctaataaggaaaaataaactaatgaacacagggagtaaagatattgatactttaaatgttaattttagagggattgaaataaaagcagttttagtatataaaaatagaaaaaatatttctataaaaatagatccatttggcaaaataattgtaatgagtcctcctaaaatatccaaaaaaataataaaagatataattattgaaaaaggagactggatacttaaaaagtcagaaaaatataaaggaagagaagaagtatacaaacaaagaatgtttataactggcgaaaaatttctttatttaggtgaagagtaccatctagttataaaagaactgttgaaagattctgtcaaaaaaagtaactgtagaataactattaacgaatatcaaatagttgttcagacaaatgatacaagtacagattttattaaaaaatctttaaaatcttggtataagatggaaagtgaaagaacagtattagagagaatagattttcttaaattaaattgtgaaataatgaagcaattagttccagcaagtgttaaggtaaaagaacaaaataagagatggggaagttgtacagctcaaaaaaatatttatataaactcaaaaatatctatggcaagattagatgtaattgattatgtaataatacatgagtttagccatttagtacatatgaatcactctaaaaaattctatgatttagtaaaatccattatgcccgattataaagataaagaaaattggctaaaaataaatggatataaaataataatctgaaaacgattattccaaaatacaggcgtaaagtataaaagaagtattattgtgaaaaaaataaataatctgaaaattttaaaaaaagtcattgacattgtaaatgatagggaatataatctatattaacaacaaaacagaattaaaatataaaattaaaaaattaaaagcaatgacagagacaacaatactaatagtgttatccacagagaaccaatgttgctgagaattggtgttaacagtagtataatgatcactctggagcttttgtactgaatatttttagtaagtacaaacgtatgtcaacgttacatgactaaggttaaggtaattaattacccgacctgaaaaaagaggggtagatgtattttttatatctacaaataaggtggtaccgcggaatataactttcgtccttataagtaatatttatattgcttataaagatgaaagtttttttattttaagcgatataaataaatttaatccatataaaattaataaaaaaataataaaaataaggagggatttttatggaaaatactgtatatgctaaattaaaccaaggaatagattcttttttaagagtggctatgactctaagaagaagagaggttgatatacaatcaataagtatgactgtagataatatgaataattcaggtataaaattaatagtaaatgaagaaaagacatctttagattctgtcttaaaccatatgaaaaaactacatgatataagagagataactgttgaaagaatgagacattaattaaatatattttataaagctaaagataaatattaaataagaaaaatcttagattaaaatataagtgtcattgaatttatcagtttatcacagttaataaatttattagtttgttgtagctaataaaaactgaaaattctaaaattataattgtaagattatataaatttagaatttaaatctgttgaataatattaaaacaatgataatgagtatgaatttctaataaaaataaatatcataaaaataagaaaaagtattgggaggaaatgaaaatggcaagaatgtattatgaaaaagatgtggatttagaggttttaaaaaataaaaaggttgcagttttaggttatggaagtcaaggacatgcacatgcacaaaatcttagagataacggtgtacatgtagtgataggtctttatgacggaagtaaatcagcacaaaaagcaaaagaagatggatttgaagttaagagtgtagcagaagctacaaaagaaagtgatttgacaatgatgttaatgcctgatgaaaaacaaaagaaagtttatgaagagagtgtaaaggataacttaaaagaaggtcagacattagcttttgctcatggattcaatatacattataatcaagtacaaccaccagaatttgttgatgttgtaatggtagctcctaaaggacctggtcacttagttagaaatgtatttacaaagggaagtggagttcctgcactatttgcagtatatcaagactacactaaaaaagctacagagacagttttagcatatgcaaaagggataggagcaacaagagcaggtgttttagaaactacttttaaagaagaaacagaaacagatttatttggagaacaatcagtactttgtggtggaataagtgaacttataaaattgggatataaaacgcttgtagatgcaggttatcaaaaagaagtagcatactttgaatgtttacatgaaatgaaactaatagtcgaccttatatatgaaggtggatttgaaagaatgagatatagtataagtgacacagcagaatatggagattatgtatctggtaaaagggtaataactgatgctgcaaaacaaggtatgcaaaatgttttagaggatatacaaaatggaaaatttgcaaaagcgtggattaaagaaaatgaagaaggacgtgaaaacttcctaaaaactagagaagaagaatataatacagaaattgccgaagttggtagaaatctaagaagtatgatgtcattcttaaaataaatatatattaaatggattagtttgagggaaagagtggtgtatagtagtgcgtatgaatggagcaaaggtaattttagaatgtttaaagaaagagggaattgacacaatatttggatatcctggtggagccgtgatacctctttatgatgctctatacgattattcagatgattttaaacatataaggacatcccatgaacaaggtttagttcatgctgcagatgggtacgcaagaagtactaatacagtaggagtttgttttacaacatctggtccaggagcaacaaatgccataactggaatagcaacagcttttatggattcttcacctatggttgtaatttcagggcaggtgccaactagtttattaggaaaagattcttttcaagaaattgacataactggagcaacattatctatgacaaaacataattatttagttagaaacactaaagaattagttcctacaataaaagaagcttttagagttgcaaattcaggtagaaaaggacctgtacttgtagatgttccaaaagatttatttttagcagaaatggattttagtggtgaggactatgatttatgtcaaatagatgattatatggattataagagtgattttgatctagatgatgaaactaatattaagcttttaaatgaagcaatagatatcataaaagaatctaaaaagcctgtaatatatgcaggtggaggtgttaaatcttcagacagtgaggaaattcttgaaaaatttgcaactaagatagatacacccgtactaaatacacttatggggcttggaaatatagatagaaagaatgaactatctcttggaatggttggaatgcatggaagtagagaaagtaatttagcactttctaattcagatttagtaatagcgataggtgcgagatttagtgatagagtgataagtaaaagttctgaatttgctaaaaatgcaaaaataatacacatagacatagacccatctgaaataagtaaaaatatagaatctaatgtatctttggttggagatgtaaagctagtccttagtttattaattgaaagggttgaaagtaagaataatagcaattggaaagaagagataaagacatttagaaagagtgagggtgtacaaacatatgaatttcatccacaaaatatacttaaaaaaataaatgaaaaatatgaaacattaaagaaacccactgtggtagtaactgatgtcggtcaacatcaaatgtggtctgctaaatactggaattttaaaggtaataaaagttttataacatcagcagggttaggaactatgggatttggtttaggtgcagctattggaactaaagctggtaatgtagataaaaatgtggttttagtaactggtgatggaagttttagaatgaactgtaatgaactagctacagttgcaaattataatgtacctatgcttattttactactcaataatagaacattaggaatggtaagacaatggcagaagttattttccaatcaaagatactctcaaactgatattaatgaaaatgtggattatgttaaactcgtaaatgcatataatattgatggatataaggtatccaatatggaagaattaggaaaggttctagatgtgatagattttaataaacctgtatttttacaatgtgatatagataaggattatgatgtttatcctattgtagcacctaatgatgcattggaaaatttgatatgtaactaaaacttatactgaatattgataaaattttttattaaatttttattggtattcagtttttgtttagagatagattggcattttttatttttgcaaataaatcaatgaatatataattaagaacttattaaattttaattatacaatttagaatagtattacaacttaagtaaatattaagttttattcgttagatttattattaataccttatattagttatggttgttatatactctaaagccttgaaattacaagcgtatagctgactatataaatttgataattttagcttttaaaatagataaattagattttgccacccatttgccaccgtattatatttttgggtggcaaactctaatttgtaattttttcaaatatatctacagtttcatttttcattttatcagttacatgtgaataggtatccattgtagttgataattggctatgacccaaacggttttgtatgtctttaatgttagcaccattttctaataatagagtagcatgtgcatgtcttaaagaatgaaaatggaagtcattgtttaaagctactcgaatttgtcttactatagtgtctaaagtgtgagtattcacttgttgaccattttctttggtacatacccaatcactatcaaagtaaaattctccgtattttaatttcattttcttttgatataatttatgttcttttaatgcctttattaaagtgtcacctgtaaatatagttctgcaagagctttctgtttttggttgccctaattcaaacattccatttggttttttaatcaaagtatgctttactgtgatagttttattatcaaggtctatattatcccattttagtgcaataatttcacctcttcgcataccagtatgaaatccaattagtaaaactatacgttgaaatgaatcttgaggaaatatatttagtatttgattaaattcttctaatgtaatagttttaactttattagtttctgttttagatttagtttttggtatgcttacatattgcatagggttttctcgtatgtgtttgtaaggatggactgctgattttaatgacctatgtaatatggcttttaatacttgtaatgtattttgagaataatcctctttgtactttttatttatgaagttttgtagtattgcaggagttaaagcttttactttgtaagctcctagttttggctttatatgtttttctatgtttattcggtagctttcttgagtgttgtatttacagttgagtaaaacatattctttgtaccaaaagtctaggtagtctgataagctgatgttactttcttcaaagactatgccagagttttcatattcatttagtgcttctcttagtgctttttctgcttctttttttgtattgccaccaactctttctactttttttctttttccttctactatgcctaggtcaaagtagtaataccatttgttgcttctttttcttactccacctttcataatagtatccctcccttttagaatgtatgtttgtttggtgtttatataaaaaatgtctcctatatttacaagaagacattaattatattcgtcaaataatatttctaatttaacttttatacattcatcacaattattttctttgttaacaaatttaataatgcaattatactttaatcctctatttattatacttgttaattctccactataatatctaggaatgtaacctatatgattctcttttttatcaaataccttgattgcatgaggatcaaatttattttctggttctaactctagaactagagcttcatttgattctaattctattgaattatcacattcatgtccttcacacccagcataatgtcttactcctgcaatataaaaatatctaattatatttttatcaatgtccaaaggaattggatctacaaattctagtgtatctataggtaatcttgcaccacttctttttaaaagttcatatgtatcatactcagacatatcatacttatccaaaattttattgatgtcctttctttttttatcaggtaatctacttgcaaatgggctaaataaatcttcactataatatgttttactaatatcatcaaatgatattaaagcattaaaacctgctttaatagcttcatcaatttcatattcataagaaaattcatacaatccatttttagctaactttccaattataaattgtcttctactttttggatctttccaaataacatataaaaaatcttttccatttttaattgacattttatccctctttcacaaattatatatattttttattcttaacactttttcttttagatatatttttagcaatttttttaactttgggcttataatattttctgaatagttatctattaatgtatttatgtttacttcattcataagatttattatcttttctacaaaatctatagtttgttcataataatttgaatttaaatattttagcacttctaagtgtgttggttcttttttattttttccatctatccttattcttgatcttgaacgtgtatttataagagcttcaaatctttgatgatcagtgaagaaagaatctatgttctcaatattaacataacaacataatgatgatccgttatcatatagaggactaagagtaattttattttgactttctagtagagcccaattattttgatgcctatctctatttccaatcaagtaatcaaaaattaacatttttagaaaatcattttttatgttatattcttctatagatttaaaaatcattttcaatgaatagtattcattatttttataatcatataacttatctgtattataacaaggataatatttgtttattaaccacacgccttcaatcaatttctcatcatttttattgattaaataactcattgaaccaattcttttattatatgtacctatctcaacattagcacaaggaatctttaacaaactagctatttcacaggctaatttttctgcccaatattctccagtttcttttgttttagggaatttaaacaagcctatatctttagttttttcattaattagccagattttctcgcttcttccactaccataagaaaaaccatcatactctttccattcatcaaaatttttaatcacgaaaataatcctctcaaacaagtattttatattcttattgtatcatttgattctaaatttgcaagaattttattatccataataagcttaacttaaaataaaaattttttctagattttatttattccacttttaacttcaagctttattacatatggaatatgtgtttactcatcaaaattactactgtgtataatggttttactttataaatacttaattttagttttctatatttatttggtaatttttttgagtgttgttaagtaagaaatattttttgtaccaaaaggtaagctgatattgctttattcagatactatgcctaggtcaaagtagtaataccatttgttgcttctttttcttactccacctttcataatagtatctctcccttttagaatgtatgtatgtttggtgtttatataaaagagcagattaactgctctttatatacttttgttatgtacaatattatcttaattttgtttatctggtttttacttaattattttcttaatattcttacaattttttagcttttatgtgtagtttattataataatattgaaatatatatttattaagtaaaaaatctataaaagtagaataaatgagtttaaaaaatatcctcatatatgtagaaatttggcaaattagttaatactaaaaatctattatttcctaagtccaacatgcttttcttttttgatagaaattctaatctttttagtaagaagttgatgctaacttgtaattcttcagctatttcgtatacacttgtagcgtgtgaattaataacatgtattatttcttcttctgttataagaaattcacatgcccattttagtgctttgttttcagttttgtctatcaagattttatttttgtaactgttttttgaagatacatagtttccaacactggtaaaatgatgtcctaattcttctgctaagatttctattagtttagcattgttttgttttaatgaattaagtaatgatataatttttagtccttgtctgtttatatacaatccttttatgtcatctgctattttgtcagtgtagtaaatttctatctcttcattatttgctaagtctaaaagtgcgtctagtttgttcattgaaatccccctataaaaagaatgtatgtgttacttttttatatataaagagcaggagtgaactgctctaaatattcattttttatatctatcaactaaaaactctatgtagctattaatatgttcttgcgcttctttaggtaaactttcataagatttaattattttggatatttcatcagtagttatgtaattttcaattgaggttttaccaagtagataatcaactgacacattaaaaaattctgaaattcttaacaagtcttctttaacaggttctcttttgctagtttctaacatagcaattttgcttagtgaacaattaagtaattttgataattctgcttgagttaattcttttttctttcttaattcttttaaccttattggaaaagttgaatttaagcattttgttaatttatttgaatcatctatgttaatttttccaattaagtaatctgtagatactccaaaatagtctgagcaatctttaataaatgattcttttggttctcttaacccattttcaattctggataaagtggatttatttatatttaagtctgtgcttaatttatctaaagaaattcctttttcagttctcaatttttttaatattaacatagattcaatccttattttttatatttattcattaaaaattcaatataatcgttgagttgttcttgagcttcctctggtaaatctttgtgaggattaactctgtgtgcggctacagtatcgatgtgatttctaacaagagttctacccaaaagataatcaattgatacatcaaaaaaatctgcccaattttctagaatatttatttctggttttcttttattattttcatattgcgatattgttgatttattaaaacttgtaaagtaaactttattgaattttgaaactagttcatcttgagtaagttttttctcttctcgtaattgtttgaaacgttctccaaaagttgccacaaacaacacctcccaataattaaatgatactataagtttacagaaacgtaaacttatgtttagaaaaaaataaaaaagttaacaaaaaaataaacttatgtattgacaagttttgtttgtgtgaatataataaaagtatgaagttcacaaaaataaaacattggaaggtgaagaacatgaagaaaagaagtttaaaagctggtcgaatagaagcaggatatacccaagaagaactagcatataagataggaatagcaaaatcaacatataatctaaaagaaaatggaaaaagaaattttacggaaaaagaaatgataatgattagctatattttaaataaaacaatggatgaactttttttagaaaaaaggttaacataaattaaaatttattgttcacaaaaacaatcataaggaggaaagaaattatgaataatttacaaatattcaaaaataagacttttggagaaataagagtaatcgaactaaatggagaattttggtttgttggaaaagatattgcagaacaattaggatataaagatacatctgatgctttgaaaagacatgttgatgatgaagataaaggagtaggtgaaataccgactcctggtggtaatcaaaatatgaaagtaattaatgaaagtggtctttattctttaatattaagttctaagttgccaagtgcaaaattatttaaacgttgggtaactaatgagatattaccaagtatacgtagtactgggacatataatatgatagatttgcaaactaaactaccaactacatataaagaagcgttacaacatcttatagagcaagtagaagtaaatgagcagttacaactagaaagtaaaatgaaagaccaagtaataaaagaactaaaaccaaaggcagattatacagatatgatattaaaaaataaaggacttgtcacaataactcaaatagcaaaagactatggaatgagtggaaaagaaatgaataaaatacttcatgaaagagggattcaatataaacaaagtggacaatggcttttatataaacaacatcaagggaagggatacactcattcagaaacaatagacataactagaagtaatggaatgcctgatgtaaaaatgacaactaagtggactcaaaagggaagattgtttttatatgatttattgaaaacaaataacatattaccagatatagaaaaaggatatagttatcaaacttcaatattaggttagtactttgaaaactaaatacagaatattttagaaaggagagattgaattggaaaataagaaaatagaagaaatagagaaaagaataaccatgcttgaaaatcaattgcaagcacagttatttagtcagataacagctcaatcaaatagtgattttatagattatatgtaccaatgtatagttttgtatttacatgagatgaataaaagtgaaaaaagaaaaattagtgaaattactaaagaaagaatcagaaaataagaatgataattacaatataaaacctattcttctagcaggttttgaagggtcagttttctttactgaagttatcataaagtttatctgtgatgtgtgttgaagaatttcagaataaactccatttactatgccgtagtagtgaattagacaagggttatgataacctacttcttcaacaatcattaagacatcttttccaaagttagtcaattttagtgcaatttcatgttcatcatcaagttctttttcaaattcctctatagatttaagaataattttatattgaaattcagcatagtaaaaatactctgtgttagaagtatcagagactgtctttcttatactttcttgtaattctttagatatattgtttgaaaactgcataatacaccatccttttgaaaattttggaatttattccatgtttatattataccatgtagaactgaggtgaatacaatgttaataggcgacaatataaagcaaatgctaagaaaaagagatataaaaccttataaattggcaaaagaattgaatatagatgtaagtggtttatataaattactgagaaataaaagttctaatccaactatagatactctaataaaattagctgattatttagatattacattagacgaattagttggaagataaataattaaaaagaggggagagaattttcacatggatatttctgagagtatagcaaaacaatttagtgatagtttaaaaagtttaatagaaatagagataagtaaacaagagacagatagagttaagagtcaaactattgaacaaaaggtaaaggtactggagcctaaagatatagttgttttaataaaaagaggttatccaaattatctaataacagtagaagaagcaaggggaattttaaagttagatacagcttttatgcgtaggttagtaagcacaggtttgataaaatcactagttagaggtgatggtagaaaaatttcaagatatgaagttgatgattttattgaaagaaatcaaggtaaaaatttggatgaacttttaaaagcagtagagtggggggatgaaattgctgagtcttgatactaataataagaatgtagtaactcttaaaaaagatggaaaagttatagcagatatagtatttaaagatattaaaactggtaagaaaatatcggttggaatattaaataaaaaagtgttggtaaaataaccaacacacaaaaaaataaaaaataaaatataacacaagtaaagtataacacaaaaaggagatatttaaaatggttgaagttaatgtaaatgtaaaagttaaagtagaagcaccagaatttacaaatgcactattagtagtggcgaatgctttaggaggtcttaatctaggaaaagcaatgcagatagaacctataaatataacagatatgaaagaagagaagaaagttgaagttaaaaaagctgaaaagattaaaaaggtagaagtaaaagaagacgttaaagaagaaatagcagaagcaaaggaagaaatagaaaagaataatgaaaatacaactagtgaagttaaatacacaaaagaagaggtaagaactaaggcagcacaagtaagtaaggcaggtaagaaggataagcttaaggagttatttggtgaatttggagctagtaagttaagtgaagtaaaagaagaagattattcagcttttatgaacaaattagaaagtttatagggggtacataaatgccattacaacatgcaagacttagtgcgagtggagcccatagatggcttcactgcactcctagtataaaattagaagaaaactatccaccattaactagtatatatgcagaagaaggaacagttgcacatgaattagcagaagttaaattaatgctagagtatgaaaaaataagtaaaaaggcatataatgcaagaattaaaaagatacagaaaagtgagtattataactctgaaatggaggactatatacaatcttatgttgagaatgtagttgaattagtaaatgatagtaaagctatatgtgatgatgtaatagtgatgttagaagaaagactcgattttagtgagtgggttccagaaggatttggaacaggagacgttgttgtaatatctgatggtatacttcaagttatagacctaaagtatggaaaaggtttagaagtttcagctatagagaatcctcaacttagactatatggtttaggggcatataatcagtttgaaatgctatacgatattgatttaattaaaacaacaataattcaacctagacttgataacatatcaagtgaagaaatagaagttactaaattacttacatgggcagataatgttaagaagaaggctcaaatggcttttaatggtgaaggagagtttgtaagtggcagtcattgtggattttgtagagctaaaaatgattgcagaaaaagagctgaggataaccttaaactagctagaaaatatgattttgctgacacatttgctcttaataaatatgagatagcagatattttaggttttgctaagaatatacaagattggttaaaggatgttcaaagttatgcactagaacaagctgaaaagcatggtgttaaatatccaggatataagcttgtagaaggcagaagtaatagaaagtatgtagatgagcaagaagttgctaaggttttattaaattcagattatgatgaagaaaaaatttataagccaaggaccttaaaaggaattagtgatatggagaaagctataggtaaaaagagttttgctaaactactaagtgatttaattataaaaccagttggaaaagctactttagtagtagaaagtgataaaaggtcagaaattaatagtatagattcagcgaaaaaagattttgaaatataaatgggggatattacatgccattagatgcaggtataaaagataaattagatgaaagcataagtataattttagatttaaaggatagaaaaaagagtatcgaaaaagatttagattatgaaaaagataatttactagatatgttaaagagactaaatattacagaatataactcaactgaagaaaatgcaaaagttatagtgatggattttaaaagagaaagtttaataaaggataaagtgatgtcaactttcctcgaagtaaatgacaatcatcttgatagagtgtatataccagaacatataaaagttagtccagtatgctttgtatcagtaagagcaaaggataattaaaaatatttaattcctagtagctataaaaagatttaaaaggggatataattttatgagtaatcaagaaataactaaactagttgaaaataatttgaatcttgtacattttagtataaatagattttttaagtcttatgtagagcaacatccatacttatatgaagagttttatcaagaaggatgtattgggttatataaagcagcattaaattatgatagtaacagaggcaagttttctacagtggctgtttcttacataagaatagaaatgtttaaagctttgcgttatggcgaaaaacattatagaaactctatagaaggtttagatgtaagtgtatttgaagatagtaaaagaccattaaaagatatacatggattttatgaaattcaatttaactatgatgttgattatataagaaaaattgcaagaaagtcatatttaaaagatattgataaaatagtagattggattttacaagataaaaagatatctgatataggagagttattaaatgtttcttcaacagttatttgtggaagaattaaattgtttagtaagcaagttagagatttagataaatttggagaaataacttcaaatataaaatcaatataccaaatataaaaatattaggaggaagaaaattatgagtaattcagtacaatcaacaaaggtagtaacaggaaaggtaagattaagttattgcaatatctttaaaagcagagcaatggtagaaggtgcagagcccaagtattcagtttgtattttaataccaaaatcagataaggtgactttaggaagaataaagaaggctattgatgcagctaaagaacaaggtaaaacttctaaatggggtggaaaattaccaggtaatttaaaaacacctcttcgtgatggagatgcagaaagagctgatgaagcagaggaatatgtaggaatgtattttttaaatgcaaatagtacacaaaagccaggaatagttgataaagacttaaatgaaatattagataatacagaggtatatagtggttgttatggaagagttagtataaactttttcccatataatagtgcaggaaataaaggaataggttgtggcttacaaaatgttcaaaagttagcagatggagaagtacttggaggagctagagctagtgcagaagcagatttctcagatgactttgaatatgaagatgaagaagaggacttcttaagttaatgaggaccttatcaattgatatagaaacatatagtgatttagatataaaaaaagttggagtctacagatatgtagactctgctaattttgagatactgttatttgcctatgcttttgataatgaagaggtaaaagttattgatttagtaaatgatgaagagttaccaaaagaagtaatagaagctttaaatgataataaagttataaaatcagcatttaatgctaattttgaaagaacagcaataagtaaatttttaaatattaatttaaaaccaaatgagtggtcatgtacaatgataaaggcgttaacactaggacttccaggaagtttagatagtgtgtctaaggctttaaagtttaatgaagataaacagaaaatgaaagaaggtaaagcattaatacaatatttctgtaaaccttgtaaggctacaaaagttaacaagggaagaactagaaatttaccaatacatgatatggaaaaatggaataaatttaaagaatattgtaaacaagatgttgtagttgaaagagaaataagaaacaaacttagtaagtataagactaccgaaagagaaattaaattatggtatttagaccagagaattaatgatactggtattaaagttgatacagagttaatagagaatgcaatagaatgtgataaaagatatactgaaaaacttacaaaagaagcaattaaaataactggtctaaataatccaaatagtccagctcaattaaaaaaatggttaagtgataaagttggctttgagattacaagcctaacaaaagaaagtattccagaaatattaaaacaagttgatgatgaaaatgtagttagaattttagaacttagaaaattaatgtccaaaacttctataaagaaatatgaggctatgaaattagctaaaggtaatgacaatagagtaagaggtctactacagttttatggggctaataggactggtagatgggcaggaagattagtacaagtacagaatttaccacaaaatcatatagaggatttagacctagctagaaacctattaaaagaaggagattttgatttaatagagcttttatatgatagtgtaccagatgtcttaagtcaattgataaggacagcttttataccaagtgaaggtcatagatttatagtatcagattttagtgcaatagaagctagggttatagcttggttcgctggtgagaagtggagattagatgtatttaattctcacgggaaaatatatgaagctagtgctagtcatatgtttaaagttccaatagaaagtattaaaaaaggtgacccacttagacaaaaaggtaagatttcagagctagctcttggatatgggggaagcataggagctttaacatcaatgggggctataaaaatgggtcttgatgaagaggagcttcaacctcttgtaacaacatggagaaatgctaatccaaatataactaaattttggtgggatgtagataaggcagctaaaaaagccataaaagataggactatagtaaaactccaacatgggattaaatttatttataatccaggagttttatttatagaactaccaagtggtagaagattatcatatctaagacctaagatagagcctcatactacatttagtggggataagataacatatgaaggtatggaacagacaagtaaacaatggaaaagaatagatacttatggacctaagttagttgagaatattgttcaagctacagctagagattgcttaagagaggctatgtttaatgtgacagatgcaggttatagcattgtaatgcatgtacatgatgagcttgtaattgatgtagataaaaaaggaggttctttagaagaagttaacagtattatgggaaaagaaatatcttgggctaaaggtcttcctcttaaagcagatggatatgaatgtgattattataagaaagactaggtgattgatttatggatataaaggccagtgaaattgaacacataaatgtaagacatgatggccaactcatgctggccataggaaaaaataaattagaaacacattggaaaaataaaagtattttatggtccgaacttgtaaatagattaagtaaaacattaagaactcaagaaacatatacagaatataggaagatgtcaaagactgaaaaagatagagttaaagatgttggtggatttgtaggtggaagcttaaaaaatggaagacgaaaagcagagaatattgcaaatagaagtattataactttagatatagattatgcgaataaagatatatgggaggatataacattattaaatgattatgcttgtcttatgtattctacgcactcacatactgagaataatcccagatatagacttgtaatacctttaactagaccagtactaccagaagaatatcaagcaatttccaggatgatagcagatactataggaatagatatgtttgatgatactacatatcaacctcatagacttatgtattttccaagtacttcaattgatggagactatatatttaaatttcaagatggagagtttttaaacccaaatgaaatactagatttatatttagactggacagatgtaagctattggccagaaagttcgagggagaggcaaaagtttaatacacaattaaaaaaacaacaagaccctattgaaaaggctggaattataggtgcattttgcaggtcctatagtataaaagaaactatagaaaatttcttaaatgaagtatatattcctggtattgatgaaaccaggtatacatattcagaaggtagtacaagtggtggagtagttatttatgatgacaagttttcatatagtcatcatggtacagacccagcaagcggaattttatgcaatgcttttgatttagttaggatacataaatttggtgaacttgatgaagatgctaaacccgaaacgcctgtaaatagattaccttcatttactcgaatgagcgaatttgcaagcagtgacactaaagtacgaaagactataggaagagaaaaccttgataaagctaaggatgattttggtgatatagattttgaagatgatgaatggttaactaggttagattatgacaataagggaagttataagaaaacaacaaacaatatcttaatgtttatagaaaatgacccatatttgaaaggaaaaatagcttataatgaattttcaaatagagctgtcgttttaggtaagttaccttggagaaaagatgataaattaaatgattggaatgatagtgatgattctgggcttagacatcatatagaaacaatttacaatatctcatcaccatcaaaagtaaatgatgctctaataattgcttttgaaaataatacttttcatcctataaaagattatttaaattctttaaagtgggatggcattaagagagtggatacacttttaattgactatttaggtgcagaagataaccactatacaaggactataataagaaaagttttagtagcagcagtagcaagagtatttaatccaggaataaagtttgataatatgatggttttatctggtcctcaaggaatgggaaaaagtacttttattaaaaaacttggtggagactggtattctgatagtttaactactgtacaaggtaaagaagcgtatgaacaattacaaggagtatggttgctggaaatgggtgaaatgatggctactaaaaaagcagatattgaggcagttaagcattttctaagcaaatcagaggatatatatagggtcgcatatgggaagagaacatcaaggtttttacgtcaatgtgtagttataggaacaactaatgataaagaatttttaagagataagaccgggaatagaaggttttggccaatagatacaggagtaaagaaggttaacaagagtatatttaatggtcaacttgataatgaaagaaatcaaatttgggcagaagcagtagaattatgtaaagccaatgaacagctatatctatcagatgaggagaaaaaagaagctgaaagacaacaaagaactcactcagaagaaaatgctaaatctggaattatcgaagagtatctaaataaacctattactgagaattggtatgatttaagtatttcagaaaagagagaatatattcatggttcagattttggtgatttaaaagaaggaacaatattaagagaaaaaacgtgtgttatggagatatgggttgagctatttaatggagaacctaaacaactcacgcctatcttatcaagagaaattaatgatatattaaaaggattagatgattggatatcatataatggaaatttaaggtttgggaaaatatatggtaggcagagagcttatgtacgtaaaagttagtgtcaacagaattaaaaacagagtaaatttgaaaattttaaaagtgtcaacaatgtcaacaaaaaaaatggctttgttgacgcttatgttgacacctaagatgcagtaattacaatgtttgaggtattaatgtcaacaatgtcaacaaaaattaagtataaagtagtataagtaatattaggcatatacgtatatacatatgtatgcctaatatgtatatatacatatatatagaaaatctgttgacattgttgacacttaaattttaaggaagtgatattttgttagaatcaaaaatagaaaaaagacttaaaaaagagattgagttgttaggtggaaaggctatgaagtttatttcaccaggtgaggcaggtgtgccagataggattgtcttattaccagaaggacatgttatatttgtagaacttaaagcaccaggtaaaaaactaaggaagcttcaacaatataaaatgcgagaattaagagaattaggatttaaagttaagtgtgtaagcacattaaaagagatagatgattttatcaaggaggttaagggatggaatttaaaccacatccataccaagaatacacaattagaaaaactatagataataataatataggtttactattagatatgggattaggtaaaacagtctgtactctaacagctataagtgaattaatgtatgattactttgatatatcaaaagttttagttatagcacctttaagagttgcaagagatacctggagtagtgaagtaaaaaaatgggaacatctaaagcatctaaaagtatctaaagttcttggtagtaaattagatagagtgagagctttaagtacagactcagatatttatataataaatagagaaatggtaccctggatagtggatttttataaaagaaaatggccatttgatatggttgtgatagatgaacttagttcttttaaatcaaataaagcacaacgatttaaaagtttaaagaaagtattgcctttaactaaaagagtagttgggcttactggtacaccaacaccaaatagtttaatagacttatgggcacagatgtacttacttgatagaggtgaaagactaggtaaaactattacaggatataaagaacgatactttgagccaggacaaaaaaattatcaaacaggagctatatataattggcaacctaaaaatggagcagaaaatgcaatacataataaaataaaagatatttgtataagcttaaaagcagaagattatttgaatatgcctagaaaaatagataataaaattgaaatacaccttgatagtaaaatacttaaatattacaaagaattagaaaaagagaagatattagaattagatagagatataataacagcttcatcagcagctgtagcagcaaataaacttttacaattagctaatggagcaatttatgataatgataaaaatgtaaaggaactccatagagaaaaattagaagctttaaaagaaattatagatgtttcaaatggtaagcctattatagttttttataactataaacatgattataatcgtttaatgaaagagtttaagagtttgaaaccaagaacaatagaaaactcaaaagatatatatgattggaataatggaagaatacaattattactttgtcatccagcaagtacaggacatggacttaatttacaatcaggtggaagtataattgtttggtttggattaacttggagcttagaactgtatcaacaagctaatgcaaggctttatagacagggtcaaagggaaactgttattatccatcatctaatctgtaaaggtacaatagatgaacaagtaatggaagctatagataataaggataaagggcaaagtgcattacttgaagcagtaaaagcaaaattaaaagaatatagggagtgaaggtatgaaagtaaaaagaaaagatggaacttataagcccaggtaaaatagtaagatgtgcttggtgtggtagaagattttataagttggataaatctaaagttgagtattgcagtagaagttgttcgaagagagcaagaaggagtgatttaagtggataaagaaagtataaaagaaattgtaagagagttaagaaaagaagaaagagaagataggaaaaaaggcgttttatataatactagattattgatgaagcattataatgattttaagagacatatagactcagcggtaagtgaagctaaagatgtagattacttagaggatgatttaggtaagcttgataatgaagagttgtatattttaagtataaagaaaagtaaagcaagaactattattatgatagcacatatagattcagcaatgaaaactttgaaattaagacaagagcgtttacattcttatgaaaagtatagagctttagagctttactattgtgatgaaaaaacatatgaagaaatagcagagatattaaattgtggagtagttacatcaagacgttggattaatgaaatggtaaaagaacttggagtgtatttatttggtatagatggcttgaaattaactgtttgataaatacatgataaaaagatgatattttaatgatatttaacccctgttataatggtagtatgaaacaagtgtataatatattcccccttgaaaaaggctaagttaccccaacttagtcttttttattttgtaaataaggagaatgataaatgagtaattcatgacttagagtgatttctaggtctttttttatacaattttaatctctcatattgaagggtcgaaaataagggtgttcaaattgaatattctttattaataactaatttaggaggtagtagtatgttgaaaattttacaagagaaaaatgtaaggatgatatggtcaaaaaatggagaagaagtttggtttaatgcaaatgacgtaggagaggaactaggcatagtaaatattcgtgatacattaagaaatatagatagagaatataaaaagaaatttaatgagtctactgtcggagattcctacactagaaactttaaagataaattgcctaactttggtactacttttgttacagaagaagctgtgtacaatatgtcatttagaagtaataaagcagaagcaaaactatttacgaagtgggttacaaaagcacttaaacaaattagaatacatggttactatattgccacagaaaaagatcaagaatggctggatataagaacagaaggtaaaaggtcagaaaagattttacagatgaaatacaagagtttttttattaatacaagtacttgaaagagttatatctatgaaattacctaggttgatagataaaggtatgaattataaagaggtatataaaaagattaaagaattaatcgaaatgatttaaatgactgtattaatagagggtctttttttttatgtaatgaattaaaaatgaaatatatttgtacattatagacaggaataaggtaaaagtattatttagacttattttgtggttgtcgaatgattattgaaggatattgactgattatatagaattatatcattataaatatttgtgaaaggaataatggtataatgagtaattttaaaaaaagatatattgatgtttatagaatagatattataaataaaattaatgggagtgtctattcagatgaagaaattttaaaagaggtaataaagaccttctttaaggataaagaatattgtaaagaaaacaaaaatggaattaatattactaaagataaaaagttttggattacagaagtaaaatgtagcgaggatgatttaataatcaaggtgaaacttgaatatactaaatacaatcagaatacaaatattataaatgctcatactaaagaagtagagggtaataaaaaaatggatcaaggagatagcaataagcagcacctatttattaaatttatgaaggaaaataatatagcagtagtattatttgaaagagtttttgtgggggttcccatgattgaactaagtaaaaacttacatctatattatgaggatatgattgaaaataataaatttgataataatatgtcaaaaacatcaattaatattacacaaatagcaagtaaagattttatagaacaaatattagatttagatggtgtttcaaaaataactttaaatgttgatagagagaagtttggaactgatgaagataatttgttttctaatttaaataattcaagacgacataacgatttgatatataagcccacatttagaactagatatttacctagtgaagttaaaagatgttgcgaaaaatatattaaaggagaggaatttagaaataaaaaaataaataggataataattgagggagagaaaaataagagaaaattaaagttggatactgagggtataaagttgtgtagagaaatagaggtttctcttgatatagataatcatatagatagtgaagacatttttgagaagatgaataatttgatagatgatttaattgagaataattcagttttttttaatttaatgtatcaagaagttgctatgagtgaagcatagattgctaaggaggtgttaaaatgtataaaaaggtattaaatatcttactcaattattacaaggctataaattctaaagaagtagtagagttagttttaacaccagtattaatatgtattatttcatacatgttttttaattcgtcaattaataaagaagttgtaatttctttaaacaaagatgtactaactttgtcaggactattagtagcttttggagtttgcattattacattattgtttactacatataacaaatcaatatcagaagcaaaagatataaaaacagaaagaaaggtaaatggatttaatatatcatactttcaattcatacagttaaaagcatattatactgtaataatggagattttggttgttgtaatatgttttatcaatacaataatgcttactcgatattattctaatataattttctatgttttaatattttttacagttcatataattttatctctaactacattaataataagtatgtttcatttatcctggaaggatagaggagactagatttgaaacaatcctattaaataggattgtttttttattcccaaaacaaacaaataaagaggtggtgatgtgcaagatgtcaaagaaaaggtaaaacaagattacttaaaaggaatgaaacaaaaggaaatatcagcaaagtatgacattagtttaaatactttaaagtcatggataaaaagatacaattggtctagtgaaaaaaagaagggtgcacctataaataaaaggggtgcacccttttctaataaaaattcagttggttatggtgctccaaaagagaataaaaatgctgaaaagtttggtttcttctcaaaatacttacctgaagaaactagggaattaatacaagaaatatctataaaagataaatttgatattctttgggaacagataacaattcaatacgcagcaataataagagcacagaagataatgtatgttaaagataaagaggaaatgattaaggaattaaagaaacatgaaatcacagaaaatagtgagaagatagagtatgaatttcaatttgcatgggataggcaagcatcttttcttaatgcacagagtagagctatgagtgagttaaggagtttaattaagcagtatgatgaaatgattcataaggattggaatttggctacagaggagcagaaaacaagagttgagaagttgaaatgtgaggttgctaacctaaataaagatgatattggagatgatgagttgaaaataagtgtagattatggtgatagaaatgatagttagaataaattttaatccagatttcaaggaagctaattttactaaaaaaagatacagagcaatgaaaggttcagcagggagtggaaaatctgttaatgtagcacaagactatatactaaagttaggagataagaagtatcaaggagctaatctattagtagttagaaagtcagaagctacacataagtattcaacgtatgcagagcttacaggagctataaatcgtatttatggtaaacaagctgataagtattggaaaactactttaaatcctttagaaattaagagtaaagttactggtaactctataattttcagaggagttaatgatgcaaaacaaagagaaaaattaaaatcaattaacttctcgaaaggaaaattaacatgggtttggtgtgaagaagctacagaacttatggaaagtgacatagatatactagatgaccgtttaagaggtattttaactaatcctaacttgtattatcaaatgacatttacatttaatccagtctcagctactcattggataaaaagaaagtattttgactataaaaatgatgatatatttactcatcatagtacttatctacaaaatagattcatagatgaagcttactacagaagaatgcaaatgagaaaagagcaagacccagaagggtacaaagtatatggtcttggagaatggggagaaactggtggagcaatacttaaaaattatgttatacatgaatttcccacagaatttgaatactttgacaatatgagactgtcacaagactttggctttaatcatgcaaatgcaatacttagaattggctttaaggatggagagttatatatatgtaatgaaatatatgtacatgaaatggatacctcagaaatcataaaaattgcaaatagtagaggtttagaaaagactctatttatgtactgtgatagtgctgaaccagatagaattaagatgtggaagagtgcaggatataaagctaaaggagttaaaaaaggaccaggaagtgttaaagctcaaatagattatttgaaacaattaagaatacatgtacatcctagttgcactaataccataaaagaaatacaacaatggaaatggaaacaagacgaaagaactggattatatcttgatgaaccagttgagtttatggatgatgcaatggctgctcttagatattctatagataataagcttaaaaataatggaataagcttcttaaagtaaaggaggtgttaaatatttatataagtgaaacagatttaataaaagttcagttaaaaaaagagagcacctttaacctagtaaaagtcatagaacactacatcttaaagcataggccagaaaaatataaacaaggagaagaatactattatggtaatactgatgtaaacaataagagaagatattatctcttagatggagctaaggttgatgattttactaaagttaataataaagcaattaacaactaccataagcttttagttgaccaaaaggtaggctatagtgtcggaaatcccatagtatttaatgcagatgatgataatctcactaagcttttaaatgacttactaggagaagagtttgacgatacaataacagaactatatctcaatgctagtaataaaggggttgaatggttacatccatatattaatagaaaaggtgagtttaaatatgtaataattccagctgaagaagcaattcctatttgggatagtaaaagacagagggaattagttgcatttattaggttttattatattgaagatatagatggaaataaaataaaaagagttgagtactacacagaaaatgacgtaacttactttattgaaagaggtaatagttttattcaagaatttttatatgatgaatatggaaaaatgactgatatacaagaaggtcattttagaataaataacaaagaacagggatggggtaaagttccatttataccttttaaaaataatgaaaagtgtgtctcagatttaactttctataagtctttaattgatatatatgataataacatttctacacttgcagacaatttagatgaaatgcaagaggtcatttatgtattaaaagagtatccaggaacaagtctacaagagtttatagataatataagatactataaatcaattaaagtagatggtggaggtggagttgataaactagagataaatataccagttgaagccaaaaaggagcttcttgatagattagaaaagaatataattatttttggtcaaggagttaatcccgaatctcaaaacacaggtgacaaatcgggtgtagctcttaaatttttatattcactacttgatttaaaatgttccaagactgaaaagaagtttaaaaaagcaattagagagcttttatggtttgtgtgtgagtatttaaagataagtggtagtaagagctatgattataagtcagttcaaataacatttaatcattctatgataataaatgagtctgaaaaaatagatatggcttctaaatcaattggaattatatcagatgaaactattgttagtaatcatccttgggttgaagatgttaatgacgaacttgaaagacttaaaaaacaggaagaaacccaaaaagaatatgatgatttaattcctactaataatcaagagggtgttatagatgaaacataaagattattggaggaaaagatttgaacaattagaagaagttcaaaacaataaaagtgtaaaatattatcttgaattggaaaagaaatacaaattagctatgaatagtatagaaaaagatatattatcatggtataacagatttgctgaaaatgaaggaatatctttattagaagctaagaaactgttaaatacaagagaattagaagaatttaagtggaatgtagaagagtatattaaatatggcaaagaaaatgctataaatcaaaagtggatgaaggagttagaaaatgctagtgcaagacttcatataacaaggcttgaagctttaaagttacaaatacagcaacacgtagaagttttatatggaaatgaacttgatggtattgataaactaatgagagatatttatacaagtggatactatcatacagcttttaatgttcaacaaggagtaaacgttggttggagtttaatgagtcttgatactaatagaataaataaaattatctctaaaccatgggcaacagatggattaaactttagtgaaagaatttggggtaagcatagacctactttaataaatgaactacatactaagctaactcaatcaattattagaggtgaaaatccaaaaaatctagtaaatgactttgctaagagatttaatgtatctaaatcacaagctaagaatttgataatgactgaatcagctttctttgcatcagcaagtagaaaagattgttttagtgatttagatgtagagaaatatgagattattgctacattagatttaagaacttcaaatatatgcagagagttagatggaaaaatatttgatatgaaagattatcaagttggaataacagctccaccatttcattgtcgttgtaggacaacaacagctccttggttcgaggatgaagaaggctatagagcagcaagaggagaagatggaaaaacatattatgtaccatctagtatgaagtataatgagtggtatgagaaacatatagagggtagacttggaaaagaaaaagctgacacccttagaaaaatgcaactaaatgagagtaaagatagaaaacaatttgaagaatataaaaaggtattaggaaatgaaataccttctaaatttgatgaatatcaacatatgaagtataatgatactataaggtatgaggaagctaaaaagctttataaggatgtaaattggcaagttaagaatcagagaaatttaactagtggaagtgttcattcagtgccatttgaatcaaaaccaaatagtgtatttgataattacaaagatggtaaattaattcaaagaagatactatggtaatacaggaaaacctagattagatttagacttaactgaccatagaaacccaaagcaacataaaattgtacctcataaacatgattggttagctgatgaaaataaccatgataaggtaaaaagagagaaggatatggagcttacaaaagctcataaaatagctaacaaagatattttgaatggagaataaaatggataataaatttaagaatttacaacatttaattgattctattgatttaggattagatatagaatttgacttatataataaaccatataatatatctattggagatgatgatacaaggtttattactctttgccctaatggagatacaaagtattataaaaatggtaaggatatggttgataattacaacattgatggtaaattactaaaggatttatggaaagatatacaaatagtaaatatgtaaaagcacttgctaaataataaattagtaggtgcttttattttgtaaaaaatgaaaggagaaatttaaaatggattggttaaaagaattgctagaaggaataaaagtagaggataacaaaattgatgtagcttctcttcaaaaatctatagaaaagaaaataaaggagactacagttactcaagaagattatgtaaatcttgaaacacaacttaatacagctaatgaaactattaaaaagtttgaaggaggtatgacaaaagaagatgtagagaatctaaaaacaacttatgaaactgataagaaaactttggaagaaacctacaaaaaagaaattgaagaaaaagattttaattactggttaggtgatgcttttaaatctgttaaatgtagagatgaaatagcgttaaaagctcatttagacatggaagccctaagaaatagtaaagatagacaaaaagcttttgaagagcaaataaaccctttgaaacaggataaagattatttgtttaatgcaacactagaaggtgaagaacctaaaatagatactataacaccagggcaagagcctaagataaatgattttggttttaattttactggggtaagacctcatgaaaataataataaataggaggaaataaaatggcagcactaaattatgcaaaagaatattcaaatgttttagcacaagcatatccttatactttaaacttcggggatttgtatgcaacagaaaataatggaagatatagatggacgggttctaaaacaatagaaataccaactatatctacaactggaagggtagattcaaacagagatacaatagcagtagctcaaagaaactatgataatgcttgggaacctaaggtattaactaatcaaaggaaatggtcaacattggttcatccagcagatataaaccaaactaattatgtggcttcaataggtaatataacaaaagtatataatgaggaacaaaagtttccagagatggatgcttactgtatatctaaaatatatgctgattggaccgcattaggtaacacagcagatacaactgttcttacaacagcaaacgtattagaagtatttgataagttaatggaaaaaatgacagaagctagagtacctgaaaatggaagaatattgtatgttactccagtagtaaatacacttatcaaaaatgcaaaagagatacaaagaacagtaaacataaaagatggtggaacttctttaaatagacaaaccacagatattgacacagttaaaataattaaagtaccatctaatctaatgaaaactgcatatgattttacaactggatggaaagtaggagcaggagctaaacaaatctttatgtccttagttcacccaagtgcaataattacacctgtttcttatcagttctctaagttagacgaaccaacagcagttacagagggaaaatacttctactttgaagaaagttttgaggatgtatttatattaaataaaaaagctgatgcaatacaatttgttgttgaagcatagaaaaaggagtgatatatagtgccacaagtaaaaaaactaaatagaatactaaccatagaagaatgtaaaatagatgatttcttagagatgggatatgatttgatagatgaaactggtaaggcagtaaagtatggcaagtcattaagtgtaaaagatttaatagctgaaaataatattttaaggtcaaaagttgagtctttagaagaagaaaataagcagcttaaagagaaaaataaacttactaaaaagtaggtgaaaattatggaaaataatataattgatgaaatagaaaaaagacttgaaagttttggatatatattaaaagatggagataagtggttaataggttttgtaagagaaaaaatagaaaatattattaaactagattgtaatataaaaactatgccaattgaattgaaagaaattgaagttgatatgatagttggagagttcttatttaccaagaaaaatatgggtcaattagatatagaaagcattaactttgaagctgtagaaaagtctatatcagaaggtgatacaaaggtagattttgctataggaagtggttctcaaacaccagaacaacgctttgatagcttaatagcttatcttactacttatggtaagaataagatattaacctttaggtgcttaagatggtaagtaaaactagaaaagcaatagaaatgttatatagagataaatgtactatagttgagtatcagccaattaaagaccctgtaacaaaacgaactaacaataaagaagtgattgtattagaaaatcaaccatgtaaactttcatataaaaatatagtttctgctacagaagggaaattagctaagctagagcaaactattaaactctttatatctccagatatagaaattaaagcaggttcaaaacttattataaatgataaagagtatgtaagaagtggagaatcagctatatatccaaatcatcaagaaataatacttgagttatttaaggataaagcataatggctagatggggcagtgttgattttagagagtttaaaagagtttgtaaaaagatggagaaatttacaaagattgatttagataagttttgcaaggatgcagcaagagaattagcagcaagactcttaggaaaagtaattagaaggacaccagttgatacaggatttttgagagagggttggagtggagtagcttatgctaggtcgcttcctgtttacaaacaaggtaataattatattatagaagttgttaatccaactgaatatgccttaacacaatggggcatataaaacccagcaaaatcggtaaacgctaagtgtaatagtgttacattataaagtaggtagaatatggacatagaataactcttgatttataatgtataaaagaggtgattttatggcaaaatttttagatattacaggaaaaaaatttggaaggctaagagtcattaaattttctaaagagataaaaagcggtaaaagaaataggaaatattggttatgtaagtgtgattgtggaaatttcaaagaaataagaactgactctttaactagtggcttagtgcaatcttgtggatgtttaaaaaaagaacaagataaattaaatttaacagacaaataccaatttaaaaagaaatataaggttcaaaataaaagactttacagtatatggaagggtataatatctagatgtacagataaaaataataaaagatacaatagatatggtgaaaggaatataattgtgtgtgatgaatggttttgctatgataattttgcaaattgggcattgagtaatggatattcagagaaacttacaattgatagaataaataatgaaggaaattatgaatcaagcaattgtagatgggtggatataaagacacaatgtagaaataggtcaacaaatatattagtaaaacatgaagaaaaagaaattacattgatagagctttctgaaaaaacaggtatttcatactcttgcttaagaagtagatattctaagggattagtaggaaataagcttatagaaaaagttaagattattgaagaaagcagagctaagttatctattgaggatgtaaaagaaattagaaaaaagtattctgatggatatacaataaaacaactaagtgaaatatatcctgtaacatattcatctatatcaaatatagtccatagaagaacatggaaaaatatttaattaattatatatgccaataccgaggaaaacctatagattgcggataggctataggtttccgtagagcgtagagagtgaataaatataatctctccaagagtgctgggcaactaaataaagtttattttgttgatgatgtacgccgaacttataggaaactataagagctagaggataaaaagcctttaggataacaaaatgcatatgttgaatttggtcatagaactaaaaatggcaagggttgggttaaaggacaacatttcttaactatttcagaaatggaactacaaagtcaagttgataagataatagagaaaaaactattaatattgcttaaaggagtgtttgatgcttaataatattatagatggaatatcagtaaagttagataaatcgtttggagaaaaatatacaatttatagcgaagatgtggagcaaggtattaatgaaccttgtttttttattgttcctttaaatccaagcaagacaccatatccaagcgggagagaattaaagaaaaattcttttgatgtacattatttccctcgttcagaagataagaattttgaaataaatgagatagctgagatgctactggaggaattagagtatatagaaattgatggagatttagtaagaggtacaaatatgaattttgaaattatagacaatgttcttcacttctttgttgattataactattttactataaaaaataatgataccaataagatggatacagtagagttattcggtggtttgaagagaggtgataattttgagtaaagcattaagcaaagaagataactacaagtttactaaggagcagatagttaactctaagaagtatgtaaatagaaaagatttattaaatgcaattttaaaagaaaatgagttatattccttctcagaggtagaggatagaataaataaatttatgaaaggagtgagttagatggctttaggtggaggaacattcgtaacgcaaaataaaatacttcctggtgcatatataaattttatctcagctaagagggcaaccagttcattatcagatagaggtattgttgcaatgcctttagagttagattggggcatagatgaagaagcattccaagtaaccagtgatgattttgagaagtattcagtgaagtattttggatatgattatactcatgagaagctgaaaggtttgagagatttattcaaaaatataaggttgggatatttttataaattaaataaaggcgttaaagccagttgtactatagccacagcaaaatatagtggtataagaggaaatgacttaaaagtaacagttacaacaaatatagatgataatgctaagtttgatgttgtaatacttttagataataagaaggtagatactcaaatagcaaaggttattacagacttacaagacaatgactatatcacttggaagaaggatgcaacactagaagcaagtgcaggacttgtatttactggtggaaccaatggcgaagctgtgacaggagcagagtaccaagctttcttggataaaatagaaagttattcatttaatgcactagggtgtttggctacaacaacagaaattaaaagtttatttgtagaatttacaaagagaatgagagataaggtaggagctaagtttcaaacagtactatataagaaaagtgatgcagattatgaaggtgtagtgtctatagaaaataagattaaagataaagatttagttgaatctagcttgatttattgggctactggagctatagcaggatgcgatataaataaatctaatactaataaaaagtatgatggtgagtttgatgttgatgttaattatacacaaatacaacttgaagaagctttaaaaactggtaaatttatattccacaaggtgggagatgaagttcatgtgttagaggatataaatacttttgtatcatttacagatgataaaaatgacgatttttcaagtaaccaaagtgttagagtacttgaccaaattgctaatgatattgcaactttatttaatgaaaagtatttaggtaaagttccgaatgataaggcaggaagaataagtttctggaatgatgttgttaaacaccataaagaattagagaatataagggcaatagaagattttaaaactgatgatgttagtgtagagcttggaaatgataagaaaactgtcatagtatctgatgctattaaggtaataaatgctatgagtaagctttatatgactgtttcagttaattagagaggagagtgataatatggctcaaacaataaatgctaaagatacagttagtgcaaagaaagctgaatgttttataactatagaaggtaaaagatataattttatgcaagctatagatttagaggctaaaatggaaaaaaataaaagtgaagttccaattctaggaagaacaacaaagggaaataaaacaactgggagtacaaatactggaagtgcaacatttcattataatacttctatttttagagaattactttacagatataaagaaactggtgaggatatttattttgacatacaagttacaaatgaagaccctacatctgctgtaggaagacagacagtagtacttaaagattgtaatatggacagtggaataattactaaatttgatgctgatggtgagtatttagatgaagatatggatttcacttttgaggattgggaattagttgaatcctttgcattacttaatggaatgttataaaattgaattatacttgaaaaatattatgatgtaagtataaattatttggaggtatttcatggaatttgaaagtggaattaaattaggcaaacttactttaattaaatatttagggagaaataaacatagtaaaaaagtctggctatgtcaatgtgagtgtgggaataaagttgagagagtagaaaataatttaaagcaatcaattaaaaatgagaagcctccacattgtggttgttctccaaactggaaaggacaaaataagagatttaaagatataactgggaaaacttttgggaagcttacagtattgaaaatgtctgggaaagataaatatagtcacaatttatggttatgtcaatgtgaatgtggaaatagaacaataactagtacaagtgcattagaacaaggaaaagcacaaagttgtggctgtataagaaaggaaatattactagagcgctctacaacgcataataaatctaatgatagcttatatagagtttatcaccgtatgattaaaaggtgcacaaataagagtaataaagattataattattatggaggtagaggcatagaagtatgcaatgaatggctagaggattttataaatttttataactggtctatagaaaatggatatagaaaaggtttaacaatagatagaattaatgtgaatggaaattacgaaccatcaaattgtagatgggttacttgggaagttcaacgaaataataaaagaaatagtattagagttaattataaaggtgaaatgattactttaaaacaatgtgcagaaaatttgaatgttaagtatctatttctttataatcaattagttactaaaaaaattccattggaagaagtaataaaaaatataggtatggagtaaaatacacatttataagttataaatgtgtattttttatatgaaaaattaaaataaaaggagattagaataatatgagtaatttaagtgcttttttaagtcaaaatgcaataaaggttgataatgtaaaatatgtagcgagtaacagatttttagataaagaagggaaaccagttgaatgggaattaaaagttttatcatctgaagaagacgaagcactaagaagaaagtgtactaaaagagtaaaagtgattggtaacaatggtaagcatactggacaatatacaagtgaaattgactacaatagttatgtagctgaattatgtgtagcatctacagtatttccagatttaaaggatgccgaactccaaaatagttatggagtaatgggagaagctcagttattaaagacaatgcttacagcaggtgagtatgtcaattatacagtaaaagtgaatgaagtcaatggatttgatacatcttttgaggataaagtagaagaagcaaaaaactaatcagaggtggcgattttgatgctagcatcactcattattgtattcaaaaattaaagtggaagccaagtgaatatatgaatttagaagttaatgagagagcgttagcagccgcctcaatacttataaagatagaagatgaagaggaagcaatgaaagaagctgaaagagagagaaagaggggacgaagaagatagcaaaataaaaaaataaatatagaataggtaaaatatgtaataattatatgttataatatttttagcaagaagatgtaatctacaatttatagagtggagttcatactgggataaaacctacttcctaatgaaaggaggtgggaagtatgaataactttttacttaatgtaatagctggcgttattgctagtttaatattttgcttaatttgtaaagtatttctaaaagtaaaaagccactcaactcgtggcaagagtaaaagtggctgggaatttgattttaaaatcaagttccacaaatttaaataattactaattgtttaaattatgaacttcactctactgtcaaatagattgtagttcttcttgcttttattataccacaaattagaaaaaatattgtttatataaaataaaaaataaaaatttttattaaaaaaatgaaaacttgattataaagcaattaatttataaaatatatataaataagtaggtatttatttacttgaatttcattgtttatataaaaaaaatggaaaaatatgtaataattataggttataataattgtagcaaggataataatcgaaagtgcgaagggtgattattttcatattaaacgccaaattccaaataaggaaggaggtgaaattatatgataggttttttattaagcatactagctggtgttatatcagcttatatttatgacaaaataaaaaatcacccagacgccaataagggtgatttaaaaaaataatattttcacttaacaactgaaaataatcactctttgtaggaataaattatttccttgcttttattataccacaaattggtacagatattcaaaaataatatttttatgatataataaaaatgtagagattttgcagtgagcgatatttgtgataaattgaagtttaacagttgcaatataaggcgttgagggtgtgtgataaatgttatcaattgcactactcatggttcactgcaaatttaagagagttgtatatgtgtaggtattgaaaatactcaacttattttggggttttagattaactatatggaatgtaaatgttgtaagaagtatcattctattttttaatctttctgttttagattaactatatggaatgtaaatttcagtgagaataagctttattgtcgatgtaacactcgttttagattaactatatggaatgtaaatagtacatataatgagtctttaacatcagttatgaaaggttttagattaactatatggaatgtaaatgattgtactttagcgtctgcactagctttgtctatcgttttagattaactatatggaatgtaaattattttacagatgaacaattacagttacttcttgaatgttttatattaactatgtggattcaaaattaaatagaaaaaagaaagcacttacttaaatagtaggtgcttttgttttgctcaaattacttaattataaagttgctaagtacaactttttagaattatacaatataaaaatgcactaaagtgattgattttgctcaagttggtcggttgagtaaaataattagaaaaaaatgttaaaaaactcttgaaaagtgtcgcgatacaatgtataattatattatcgcgatacagaaaagaggtgaaaattattactgatagcagtagagcagattacttcaagcagagacgacagaataaaaaaacttttagtgttctactagatagagagaaagtagagaaaattgaagaacatttaaaaaagcagaacaagactaaaactatttggcttgaagaaaagattaatgaagagctagaaaaagaggaataaaaaataagagacgttctccccgaccaaagattgaacatcccttattgacgtatattatatacactaactatagtatacgtcattccttgaaaaaattcaattaaggagtgtaatagttatgaaaaatttaatagtaaaagagttcaatggaagtcaaatttatacttttatgtggaaagaaaaatcttgttggatagctaatcaaatagttggattattcgattatgctgatgtatctaaaacaatacaggattgcataaaagcagaagactttgagattgaacaagagtatgatgtattgaaaggaaatgaatttaatgattttgtaactactttaaatgtagtcgcaaataatataattagtaataaagctagaagtataactattttttatgaagatggtttatatggatttttacaatacacagacaaacctattggtgtacagtttaggaaatggcttagacgagaagttttaccaagcataagacaaactggtgcatacataactaacaatgctaatcccgaaaaactaagagaaaaagcaagtgagattgagaaattacagttagcttacaatagtacatctatgttaaaagaactattagatggtgcaggctttgacaataaatccaaactattaacagctaaaacattatataagaaagcaggaattgatttaccaatagagataaacgaagaagaacattattttgatacaaagcaaatagcatctaaactgaaaatatattctaagagtaataaaccagcacagttggctgtttgtgaaattattaaaaagattgatttagaagaaaacgaagtcaaaggcgtttgggaaactaatggttcttggactggtactgtaaataaatatacaaagagtgtaatagataaggttagaaattggatagaggaaaataatagacctactaagattgcaggtgaaaagaagaattatcatgtggtttataagattgagtaaatttataagattgtattaaataatttagtttagttttggggggattaatacaatgcatgagaatttacttgatagtatagatattgaaaagagaaaagaagaatttagaattaaacttttgaaaataagagaaacagatatagatatatataataagatagaaagtatagtatataaactttcttagaaaaaattagagaaaaataattaaataaatagataaagcacttggatatttcactgtttcaagtgctttatatggtaaaaaatggtataataaaatataggaattttgcagtgttcgatttttctactcaagtatagtttaacaattggaatacaaggcattgagaaggtttgataagtgttatcaattgcactattacccgctcactgcaaatttgagaaagttatatgtgtgtaagtcttggaaatacacaatttattttggggttttatattaactatatggaatgtaaatctttgtaatggtagtgtatttaagattgaaacatcaagttttatattaactatatggaatgtaaatcaacattagtagttgtctttatacacatagcatcacgttttatattaactatatggaatgtaaatacagctcccaagacatacaacgaatctgtaacatcagtgttttatattaactatgtggtatgtaaaagacttatttacagctttatttgctaaatcagaaggttttatattaactatgtggacttaaaattaaaaataattaaaaaacacttactaatgtaggtgtttttttattgaaaggaagtgattataatgtaaaaattttgaagatatagtataatattcttataaaatataatttagggggatattatgagagaaggaaagagaagaagaggatgtctattttggtttattcttattattttattttctggagttgttggagcaatagcagggaacagtactaataatgaaagcactgaaaaacagaaagaggatttaactaaatatattggtgaagaaggtagtataggagatttaaaattaactgttaatagcatttcaaaagctagtgaaatatcagtagcatctggttatttagcatacactccagatagtggcaaatatggtattataaatttaacaataaaaaatcaaactaaggaaagccaatcttttatgctaaattcattcacattaataggaccagatgattcaaaatatgttccatctttattgattgatgtaggaaataaatatataactatggatactgtaaatcctaatttagatgtaacaggtaatattgcatttgaaattcctaaggatttactagtttctgattgtaaactaaaatatagtggttcagagcaagaatttatattaaaagaaaaataatatatagatttaaaaatatgaagcatttactttaaataagtaagtgcttttttaattaaaaggaggtgataataatgtaaaaattttacttatatagtataattacattataaaattattgtactggggggaatcttatggggttatttggaaagaaaaaagcagatatatgttgtatttgtaatactgagataggagtactgaatattgaagatggttggatatgcaattcttgttttaaagaatattgtgatgcactttctatgactaaagcacctaaaattttaagaaaattagatattgaaaagactatatcatcaactaaaaaaaataatgaacttcaaaaaatatttaatacaactaataatatagaaaactatatagaatttgatgaagataataaaaaatggcttgtgtctaaaaaaagtataaacgataaaaaaactcctatcattcattcttatgaagatatcgtgaaatttgaacttcttgaaaatggtgaaactgtaactaaaggaggaataggaagagctttagcgggaggaattttatttggagaagcaggagctatagttggagggataacaggtaaaaaaacaacaagaaaagttgttgatacatttaaaattaaaataacaattaataatattgataatcctattgagtatatcgaattaattaataaaaaaacaaaaactaattctagtgcttatgagaaagcttacaaagatgcccataaaattttatcaacattatctgctattacacaaagcattaaagagacagacaatataaatactaaatctgtagcagatgagatattaaaatataagaatcttttggatatggaagctattacacaagatgaatttaatactaagaaaaaagaattattgaatttgtaatataataaacacttactaatgtaggtgtttttttatatggaaatttatgaaaggagagtgagaaagtggcaacgatacaaacttcaataaagattttcgacggaatgacacctgcttttaggaatatgactacatctattaatacgacaattaatagccttgaaaggttacaacaaagattgcataatccgcttaacacaggtgggatacaagcatctcaacaaagtttaaacaatattgaaaacatattaaccaggatagaacagaaaattggaagaaatacaaatgaacaagaaaactttaataataagataaagcaaggaagtgaagcaggttctctattagtatctaaactcaaaagtttggctggcatatatattggaataagaggtatagaaagtattacaaaagcagcagatacaattgcaagtacaaaagcacgtttaaatttaatgaatgatggattacagacaacagaacaacttaataagatgatttatttatctgctcaaagtgcaagagctagttatgcagatacggcagcacaagtcgctaaacttggaatattagcaggagatgcttttggaagttcggcagaggtgataaagtttacagaacttatgaataaagcttttgtaattggaggaacatcagcaaatgaagctagtgcggctatgtatcagcttactcaagctatgggtgcagggaaacttcaaggtgatgaatttcgctctataatggaaaatgcacctttattagccactaaaatagctgatgcaatgggaaaaactaaagaccaattaaaggaattgtcaagtagtggagcaataacagcagatgttataagaaatgcactatttaaagcttctgatgagatagaaaagaaattcgcaagtatgccagtcacttttagtcaagcacttactatgatgaaaaatgacgcctacatgatttttgggcaaaccctcggaaagataagtggagcattgcaaagcgttagatttagtgaaattgttgtatctataagaaatgttatgattgcaatatcttcaaacatttacgatacattaaatattataaaaaatattttaaatagtgaattcttttcaaacttagtgcaaggatttacattttgtgcggtagtaataactaaaagcttaggttctattgtaaatactgcattaaatatagttaatatatttgcacaaaattggagtataataaaacctattgtatttggtgtagcttctgtttttatattgtttagaggggttttgctagcgactaaaatagctacaataggtaacgtaattgcgaatgttgctcacgctgcttcctcttcactatcagcacttatgactaatatacaagcagcagcactgatgcgttcgaatggagctactttatcagcaacaatagccacttggggtttaaatgcagctttattagcttgtccaatcacatgggtagtattaggtattctagcatttgtagtagtagtttttgttgcagtagcagcagtaaacaaattcgcaggtacaagtttaactgccttaggagtaattgtgggtgctgtatttgcagcagtggcagcaatacaaaatgttatgatttggttattaaatggctgtatagctgtaaatgaaggcattacaaatggttggaatcaatgtgtatatctaatgaaacaagctattgcaaaaggtgtaatctttataatcgagaaaatggcatctctaaataattctgtaaataatgctggaaatgcacttgggaaagctttcatagatggggcaaatatcgcaatacgaggtgtaaacaaattaattgacctaataaataaaataccagggataaatattggtaaagtaggagaggcaacgtttacgccagttaaggcagataatagttacatcaaacaacagattgatagcttaaacagatgggtaggagacgcaccagagaaagtaaaattggagcgaatgggatacaaagatattggagcagcatttcaaaaaggaaatgcacttggaactaaatggcaaaatgctataactgataaatttaaagatacttttgacattaataagatgctagaagatgcaaagaaaaaattaggattagacgatttgtggaataaacaaaatcctttaaacaaccttggtggatttggtggagatttaggaaaaaatgtaaaggacacggcaggcaatactgcaaagatggcaaagactatggataaaagtcaagaggacttaaaatacttaagagatatagcagagcaagaaacaatcaatcgattcacaggagtaaacattaaaatagatatgaacaatacaaacaacataagtaaagatacagatgttgatggaatagttaatgtcttaactgaaaaactgaacgatgctatggttgtatcagcggaaggaatagtttaggaaggagagtgagaaaatggcttatgatttttacctagatggagtacaactaccaatcgcaccacccaagcttgaagtcaaagtgacaaacaagaacaagacagttgatttgataaatactggagaagtaaacatattaaaaaaagaaggattatctgaaataagttttgaagcagaatttacacataataaactacctttttgtagaggtcaatttagagatgttcaattctttttaagtaagctagaattactaaaaactgattgtaagccatttcaatttattgtatctcgtgagttaggtaacaaggtcttatttaacactaatataaaagtatctcttgaagagtatgctatttcagaagatgcagataatggctcagatacaaaagttgcaataaaattaaagcaatatagagattactcaactaaaaagttagttcttgcccctcctaaaaatgagactggtagacctaatgtaaagatagagccaaaacgagttgattcagtcaatgccacaaacactaaaacatatacagtaaaagcaggggatagcctttggtcaatttgtcagaaacaacttggtaatggttcattatataagaaagtatacgaactaaataaatctatgatggataaggcaaataagggcaaaaacttaagtaaatacactatttataaagggcaggtgttaaaacttggttgatgaattagtgttagcaaatgatagagatgtaagattagtaatagctcattgggaagatttctacgaacctgctgtcattgatggtatcacatgggagatagaaagacgaggtacaccttctaagttagagtttacaatagtcatggatgatatactagagttttgcgaaggaaattctgtaaggctgtattataaaggaataggcatattttatggatatatatttcaaaagaaaagagataaagaaaatcacattaaaattgttgcttacgaccagttgagatattttaagaataaagatacttatgtatatagtaataaaactgcaagtgaacttgtaaaaatcttggctaaagattttaatttaaaatacaatgtcatagaagatactaagtataaaatatctagagtcgaagaaaataaaacactctttgacatgatactaacagcactagatgatactttaagagagaaaaaagaaatgtataccttgtatgatgattttggaagaataacattaaagaatgttgcatcaatgaaactagatactgtcatgaacaatgatgtaattgaggattttgactataattcatcaatagatagtgatacttacacaaagattaaacttgtaagagacaacgaggagtcaggaaaaagggatgtatatattgctcaagactcagctcacatgagaagttggggaatacttcaaatgtttgatacagtagacaaaaacatgagtgaagcagagataaaacaaaagtgtgatatacttctaaaactatataataagaaaactaagtcattaagtttaaaaaatgcacttggagatattagagtgagagcaggttgtttagtacctgtttttttaaatctaggagatattgaattgcaaaattatatgttagttgagaaagtaaaacatacatttgaaaataattcacatttcatggatttgaccttggttgatggagacgaatttgcttcatattcttcaagctcatatagtagtggaaatactaataataaagatgaaaagaaaaatggtcctgcacaaagtattatgaaaaaaaatacaggtaaaaaagttcctgctatatttactgcatattatccaggaaacaatgcaatggaaggtggaaaaacagattgcaatggaaagccacttgatgtaaaatcaagaactgttgctggtccaatgaatcgagaaggagttaagaaaacttggtatactgatgattttctaaataaacatccagtttttgaatatggagataaagtaaaaattatacttcctggtactgcctatgacaacaaagtatatacagttaaagataatggaggaagaatatatgttgaaacaaacggaacatatcatatagatatactattagctaatgctagtgaatgtaaaaaatttggtagaaagaatggctatataattataggtggagatgaagaacaaacatatcaagttgaaggtaataaccaaagtaatacaaataacaattctaaagaagataaattaattagtatagcaaaaagtaaactgggttgtaattatgtgtatggagcagaaggtcctaataattttgattgcagtgggtttactcaatggtgttataaacaaataggtataaaaattcctcgtactgcttctgcacaaagtaaagcaggaaaagcagtagatttaaaagatagaagcaagtggaaagcaggagacttattatgtagaattggtggaggaagtagtaatcatgttgtaatgtacattggaaacaatcaaataattcattcaccacaaacaggagatgtggtaaaaatagagtctgttaattcttatagaaaaggaaaagcatacacacatgtgagaagatttatataagtgaggtggcaatatgagccaagatttattacagataataaaaaaagctgcaatggatgcagtagaaacaagcaacccaatgagggttgtatttggaacaatagaaagtattagtcctctaagagttaagatagaacaaaaactatctattggtgaaatttttctaatacaaacagatacatttaaaagatatacagataaaaaaatgggagataaattagtcttaattcgtatgcaaggagggcaacaatacttgattttagataggatgtgataaagtgttaccaagtgataatttagattatgatattgaagatgtatcaataattaattttgatgtaagacaagagccaagtaagacatttaaacttcatatagaaaagtctaagattgatggtatttgtgatgatgtagaagcattaaaacaaaccatttttttaattttaaatactgaaaggtatgagcatcttatttattctagaaattatggtgttgaattaaatgatttaattggagaacctatttcatatgtaatacccgaacttgaaagaaggataacagaagcactaattcaagatgataggattgaaaatatagataattttgagtttcaaaatataaagggtaaagtacaatgtagattttcagttcatacaaaatatggaaatataaaagcagagaaggtggtgagtgtataattgtttgagttaatgacatttgaaaatataattaaaagaatgttagatagtgtaccagatacttttgataaaagggaaggttctataatatataatgctcttgctcctgttgctatagaacttacagaaacatacattgctatggatgaattactagaccaaacattcgtagatactgctagttattattatttagagaagagatgtaaagaaaggggaataacaccacttgaagccactcatacgattgctaaaggagtttttaacatagatattccacttgattctaggtttaatctaggagaatataactatgtagcaattgagagaatatctgaaaaaacatataaaatgaaatgtgaaactactggacctgtatttgagttaggaaaactaatacctattgaatatatagatggtcttgaaactgctgaactaactgaaatcttgataaatggagaggatgaagagtcagaagatagtttaagacaaagatattatgatagcctaaattcacagagttttggcgggaatatacaaaactatagggatgaagttaacaaaatacaagatgttggaggagttaaagtttatccaacttgggatggaggtgggactgttaagttagtaataattaactctaattttaaagtgccaagtgaagaattagtaaacttagttcaagaagaaattgacccaattggacaccaaggagaaggcttaggattagcaccgattggacaccgagtcacagttgaaggagttacaagtacaactataaacatatcagcagaaataacatacaaaaatggctacacttgggagaatataaaatcaattgcagaagaagcaatagacgactatttaaatgaacttaacatgagttgggaagatgaagaaaacttaatagtccgtatatctcaaattgaaactagattacttagtattgatggagtattagacattgcaaatacaatgataaatgatgttaaatctaatctaacaatagatagtaacagcatagtagtgagaggtgaggtagttggataaagagattaatctaataaattacttgccacaaattctacaagataaagaagaatatataaaagtatttaatgtagaaaataaagaaataaaaacactacatgataaattaaaggacctatcaaatgaccagtttttagaggacctaactataagtggtataaaaagatgggaaaagataatgtctataactcctaaaagtaatgagagtttagaagatagaaggtttaggatttttagtaaatatataagtaaattaccttactcagagagatttttaaggaactggctagataatgtagttggagaaggcaattatgaattaactattaataatgctacttataacatacaccttgagagtgatgctagaaatcaagattggtttgaggaagttcattcttttgtaagtaatattaagccatgtaatatgactttagattacactagagtgcttataagcaaagacaattatatgaattttggtataacaaccctaatgggtcaagaaataactatatacccttggagtccaccagatatagaaacttatggagaaattgatgtattaactggcaatggagttggataccaagagataacaatattttaggaggtgatatattggctatagataaaagttattacactataattacagatgtaggaaaagcaaagatagcaaatgcaagtgtcacaggtaataaagtagggtttgtaaaaattcaacttggtgatggtggaggaagtgagtatactcctactgaaagtcagacagaacttaaaaatgtggtatgggaaggcaacatcggaaatacaaccacagatgaaactgcgccaaactgcataatattagagagtttaataccatcaagtgtaggtggatttatgataagagaaataggatatttagatgatgaaaataatctaattgcaatctctaaatataaagaatgttataaaccttctatagaacaaggagcagttgttgatatgaaggttaaaactgtgcttattgtatctaatataaataatatagaacttaaaattgaccctacaataatttttgctacgctcaaagatatacaggatttagatgctaaaataagcaatgtaaacactaaaattgatacaactaaaacagagttaacaagcaacatagaaactgctaagacagagttaaacactagaattgacacagaaaatgagaaacaaaatattaaaattgaccagctaatagcaggtggttcaaatgttgcatctactcaaacaataacaattgatgattggatagataatcaagaaggtggattcaaagcaactgtaacacatggtttattaacacagagaataactgtaagtattatagatgctactacaaaagataatgtagtacccgatttcacaattatagacgataattctattgaggttagaagtggagtaaaagttgagttaaatgtttatgtgattaatgggaatgcagagactcattttattaatgcgactgtagatgataatagagtgtctgaaatgactacttattcatcaaaaaagatacatgaagaaattggtaaggtagcagagcaactgacaggaattaatagtaatattatatcgactgtaaataacgacatactacctatatagaaaggagcgtgaaaaaatggcgttatcaatgagttattttaatttacctgacaaaagaaaatatactaaaaatcttgcatttaatccatttgcaggtggaaggcaaaattttgagtggactggtggtgaccatggactaaatggtgagtttaaagaaacttgcttaagttgcacttacaatggttcaacattaaattggggttcaggaaatgtttgggtcttgggggaatatggtcaatatacatttacttataattgtgaatcaatgcatgtggatacacaacaaaaatttccgtatacttctaatagaataataactataaaaggtagacctgtaatatctggttcagatacttcacttgggaataaaagaaaaggatttagtgtagattttactgtaagtgatgatactccaaatgttaatttaatagtacgtgcttatcttgatgataaattaatacaaaacattactcctgttgtacaaaattcaactttaacagcaacagtaacagatagtcaactaaactctttatccgtagatggaaatcacaaactaaaaatacaattaaatgatggatatgataattttgatagaatttttacttttaaaaaaatagaaaagggaattgatatatcaacatcattagtaactgatagccaagctaagtttactgtaacaaaaatatacagtgaattgacaaaaatagagtgttatttagatgaaacattaaaagagacttttactacagacttgtattcagaaaagactataaactatgaacttatagacaatgcaatacacacattaaaaatagttgtaactgatgcagaaaatgttgtagaagaaaaagttataagtataagtaagaatataatgccattgcaacctgatgcaacattacaagatatatcaactaagttaacagagattgggcaaggcgttagaaatggtaaaacaagcattataaatactttagcattaaagaatatagatgcaagtttaaataatacactcgttgagttatcagagaaaattaagggaggttttgatagtggagacgctagtttacaagatttgatgaatcaattaacacaagctaataatactatatcgcagttaaatactaagtataaagttgctagtggtacagttacttcttttgcggatagtactaaaattgcttatccatatctaaccgacaatgttactaaacctggttcttggattaaagttagtaatttaggctttaaacctaatattttctttgctgattttgattactatgatgctgaatataaaaataattataaacttttccttttcgcttgtaatggtgttgccacacaaagaggtgttgatttttcaagtgttacatcttttatcagaaaaagtggtgatgagtattttcatgctaatggatggctatatagtaactcagagggggatgtctattttaataatactggcgttcagattccagcttataactttgattcaactcaaaaacatacttataaatggtatgctattaaatttatttaaaaggaggaaaaaacatgaatgttccaaaccgaataatatatgaccaaacaggtagaacaatctttgaaacaggcgaatcctgtggagatgtattgccacattatacaataacggaattgcattatatagatattgaatatggaagtatagattatacaaggaatagagttataggtataaatatagaaacaaaagaaccgattttagaagaaataccagtatatataacagatgaggaaaagagaatacaagagttagaaaatcaattattaattgcagaaaatgagaaagtaggaggattattataatgaatataaataatgttgtagtaagaatattagcagaaagaatattaagtaagggattaaatcctctaaaaaatagagaatttcagttagatgacgtgactaacacagagtacagaaaagctgtagaggattatattataaaaaatagtggagtagtagaaggagcagaaccaactatatagagggttctttttttattgaaagaaggtgactaaatgacttttaaagagttggttaataaagttagaaatcttgtattagaagcaaagaatgtaactatagaagatacagaaagtaaatttacaagtgaaaatgtagaaggagcattgaaagaatgtatagatagagcagatgaggcttttcaagaagccgatagtggaaaaacacttttatcaactgctatcggctctcctactacatcagaacaaacatttcaagattatgcgaactatattacaggatttaagagcaatataagcaatttagaaactcaattgaaaagcaaatattctattagatatggtcctattgatggatatgatggtaatcctttttctgctaattttggcaagagtgcaagttaccttattgtctatgtttactttagaagaagtgtatattattataatcccagtggtagttctttaggaagtaatacaggaggttctgaacgtgcatggattactataaacagcaataaaactggtttttcagttcattcatatgatactagttatgagtcatatccttttacaggttattatattgcttgtttcgcataataaattatattattaaaactaggaggatgtatggaagaaattagcataaatctactatgtgcagtagcaggagttgtaatatcctacttagcatttagaaataactcaaacagaaagatacaagatgaaacagaaacaactacaaaattagaacaacaaataacttttttatgtgagaatgtaagagatataaagcatgatgtagcaaagtttaatactagtttcttagatattagtgaacgagttgcaaaaatagaagcaagtacaaaacaagcacatcttagaattgatgaaattgtaaatagaattggaggaaaataagagatggataatttaataagttttataccagagcagttgctaattttagtagctgctctctctattataggtaaaggttgtaaaaaatataaacaattagataataaatacattccagtagtgttactgatacttggaataggtttctcaatatggatgctaggattaaatcctgttgcagtcttacaaggtgtaatttgttggggagttgcaataggtataaatcaaacttacaaacagttgaaggatggtgaaaagtaatgaaattaacaaaaatattattactcacaaaaatttaaaaaatttcattaaatagagtatacttttatagctaataagtatataataatagtacagaactcgtaaagcatttatatgctcaaatatacgggacattgatttttgaaggaacccgccaagcttcttttatagctcaaataggcgggacagataaatttacccactaatattaattggtgggttttattatataaaagtatatctatgaaaaggtgaaaacaatggttgaagtaaaagaagaaaaaacatttgatgaacaaatagatattttaaaaagtagaggattaataataaatgataaagaagatgctaaatttgtattaagtaatgtcaattattataggtttacagcatatcttctaagttttaagaatgatgatggctcatataaagaaggaactacgtttgaagaagtttatgatatatataggtttaataaggaatttaggatattattaacagatttgttagggagcatagaaatagcatttaggacatacattgcatatacattagcaattaaacatggtgcttgtggatatctagaaagggagagtttcaaagatgaaaaattctatattaattttttgacagcattagagagagaaaaaagtaataattcagataagctttttattatacaccataaagaaaaatatgaaggaaaacttcccatttgggttgcaacggaaataatgacttttggtatgttgtcaaaattatattcaaacatgttgccagaagatactagatacataaaaaataatttgtgtagagtgaatactttattagttaaatcttggttacaatcattaacacaggtcagaaatcaatgcgctcattatggtagaatatataataataatttccgtattataacaataaaaaacgaatataaaaagtataacttggataataaaaagatattttcttatatacttgctatgaagcatttgactatggataaattaatttggaatagtttttttataaaacttcaaaagttaattaatgattataataattctatagacttaaagcttattggttttcctaataattggatagagatattggctaaataaaatagttactttaagaagtttataaacacttactatatgtaagtgtttttttattgaaaagaaggaggaaaataaataatgaaaatatgtattacagtaggacacagtattttaaaaagtggtgcatgcacttctgctgatggagtagttaacgaataccaatacaataaatctcttgcaccagtattagcagatacatttagaaaagagggtcataaggcagatgtaataatatgtcctgaaaagcagtttaaaactaaagcagaagaaaagacttataaaatacctagagttaatagtggaggatatgatttacttatagaactacatctaaatgcaagtgatggtcaaggaaaaggttcagaagttctatattatagtaataaaggtttagagtatgcaactagaatatgtaataagctaggtacagtatttagaaatagaagagctaaattagataaaggattatatatcttaaatagttcaaatcctacagcagtattaattgaaagtttcttctgtgataataaagaagattatgagaaagctaagaaactaggtcatgaaggtattgctaagttaattgtagaaggtgtattaaataaaaatataaataatgagggagttaaacagatgtacaaacatacaattgtttatgatggagaagttgacaaaatctctgcaactgtagttggttggggttataatgatgggaaaatactgatatgtgatataaaagattacgtgccaggtcagacgcaaaatctttatgtcattggtggtgcagcatgtgagaagattggttctatgactaaagaaaaatttactatgataaagggtaatgatagatttgatacactttataaggcattagattttattaatagatagattatataaaatattttagtatttcttgaaaatcataagtatggtaatatttagataaatattatttattattaataggtatggggggagattatgatatttaagaagtatataaaatcattactgatagttgttagtgttacattgataatgaacaaatcaatattatttgtaaatgcattagatttagagagtaacaataacataaaatcttataaaagaaagaatgtaaaggaaattgatataagcaataaatttgttgatgaatcctttagaagagatattgttgaaaaggtattagataatagggatgatccattaacaaatgaagttgcatcaaaagataactataaaatatatgaaagtgatttaaataaaattgagagttgcttagagttagatttacataaaaatccagatgtttctaatccaaacaaaatagataatttagatgggatagaaaattttagaaatctagaaaagcttgattgtagttcaaataatctagaaagtgtagatttaagtaaaaatataaaattaaaatatctagatattagtggaaataaaatattaaacattgatttaaaaaacaataatcttattaatgaattacattgtgatgcaaataaattatcaaatttagaccttaaaaataataaaaatttggtaagtttattttttactagtaatgaattaacagagatagatttaagtaataatgtgaacttagaaaatttacaatttcttaataataatttaaaaagtatagatttaagtcataataaaaagttgaaatctctaaattgtactaacaataaacttaaatcccttgatttaagtaataatgtttttttgaaaaatttaagttgttcaggtaataacctgagtaaattaaatataaaaggacttacaagtcttgagtatttgggatgtgctaagaataaattacaagatttagatgtatctacaaatataaaattagattctttactttgtgggaaaaatagtttaacaaaaatagatataagtaaaaataaagaattaaattcactggaatgtagtggtcaatatatagaaaaaagcattataaaaaatggtgaaaatatagttgtagatataggaattgaaaattcgaaattaaaggaattatatccacaaaattataatatttcaacaggttttctaacatgggaaaatctttctgactttccaaatagcataagttatagtttggaatatgaatatggtccagtaaatgatacagagactatggatgtaaatatatcaatagataaattagtgaaatgtagaatcagatatatagattatgatggaagtataattaatgaaaaagaaatatcagataattctagtataaatgaaattcaaattaatcctcaaagagaaaactatgagtttagtggttggaggaacaataaagatgaaaaaatatatacatcagagcaggtaagtaaattagtttttgatgatagtactgattttatagcaacttataaaagaaaatcaacaggatcaagtggttcttctggtggaacttcaagtaaagaagattttaatatagcaccatctaaggaaaaaataacaggtgcagacagaaatgaaacatcagtgaaaataagtcaaaaaggatggaataaagctgataatatagtgttaataaatgactctagcatatcggatgctttatcagcaacaccatttgctaagtctaaagatgcaccaatattacttactaaaaataataatttaaataaattaacagaaaaagaaataaatagattagaagcaaaaaatgtgtacatagtgggtggattaaagtctgttgatgaaaaagtagtgtctgatttaaagaaaaaaggattaaatgtaattagaatatctggaaatgatagatatgaaacatcaataaaacttgcaaaagaattagacaaaaattctaacctgtcaaaagtagtagtggtaaatggagaaaagggactagctgatgcagtaagtatgggagctatatcagcaaaagaggaaatgccaattcttcttactaatcaaaatgatgatatgaaagatataaaagacttaatagctaataaaaacatatcaaaatcatatgtaataggtggagaatctttatttaataataaagaagtgaataatacattaccatctgtaactaaaatagcaggttctgatagaacagaaactaactcaaaagtaataagtcatttctatagcaaagatacacttaatgacttatatgtagctaagaatggaatgaataaacaagacgatttagtagatgccttatcagtaggagtgcttgcaggtaaaactgaatctccagtagtattagttggaaatggattagatgatagccaaaaagagttaatcaagaataaaaagtttaaaaatataactcaaattggtggaaatggaaatgaaaaagcatttaatgaagtagaaaacttagttaaatagattgaaaggtagtaactggaaatagttactacctccttttttattcattttcagttttttcaataattatttttccatcctcaaaagtaacaagaacatccctttcatcaggagagatattcatctctttaatccatgacattggaagtatcaatctgggtgtaaaagagcctttgccacttttattaaatccaattctaagttttctttgctccaataatatcattcctttctactattaataaatgccagcaataataaagtaaataccaaagcaataagagctttaaaagtaaaacttattattatattaataatatttaaaactatagtgataccaagaataatcatacaaattctataaaatttattattcatattaaattagaaaatgtgttataatattagaaagaagctacctagaaggaaggtattttcctcctaggattgaaacttataattctttaatcaatcttagtattgcgagtactagattaattaaaactaatgtgaaagagaaagcatttttaattttattaaatttgttttctcttttattttttcttctttctaatctccccactttcttacctcctttctatatttatattatatcatcacgtgacgtgaaagtcaataaatattacatatttttcaataaagttatattgataaactatattttttacaaataaaaataaatggtgacaaaaccaaacttgccaccattttgccaccgaaaataaataatagaataaatttaaattaaacataataaaacataaacaacaaaactgaccttaataaaacattgaaataccaacacttgtaaaaaataacaacaataaacaaataacctagaataatattacaacttaagtaaataataattttgaataataatttacggaggtattcatatgtttaaacacgataaagcattattaaaagaagtaaaagtagaaagaccaaatcctcaatatgctgttttaatgcaagaacagttgggtggtgcaaatggagagttaaaagcagctatgcaatacttgtcccaaagttttagaataaaagaccctcaaataaaagatttatttcttgatatagcagcagaagagcttagccatatggaaatggtagcacaaactataaatttattaaatggacatgatgttgattataatgcagttaatacaggcgaaatagaaacacatgtattaactggtctatcaccagtcttaataaactcatcaggagctccttggactgctaattatgttacagttacaggggatttagtagctgacttactttcaaatatagcttctgaacaaagagctaaggtagtttatgagtacttgtatagacaaatagatgataaatatgtaaaagaaacaatagatttcttacttaacagagaagaagcacataatgctctatttagagatgctttaaataaagttaaagatacaggttcaaatagagattttggagttacagaagattctagattatatttcgatttgtctactccagggccaaatcacaatactaagatagatattaatcctccttcttttgaaaaacctttaaaaaaataatttgatattttttatgttgttttgttttagtagttataaaaattatttactagaagaattaattatatgaaaaattaaatatgtatagttaaaaatgggtatacacttattataagtgtatatctatttgtttattgcaaaacatataataaaataacaaatgaggtggtattttggacagtaatagaaaacctaataatctaataaatgaaaaatctccatatcttttacagcatgcttataatcctataaactggtatagttggaatgatgaggcttttaaaaaagcaaaagaagaggataaaccaatatttttaagtgtaggatattcaacatgtcattggtgtcatgttatggaaaaagaatcttttgaagatgaagaagttgctgaaataatgaatagaaactttgtggcaataaaagtagataaagaggaaagacctgatgtagatagcgtgtatatgacagtttgccaagctatgacaggtagtggtggatggccaatgaccataataatgacaccagataaaaaacctttttttgcgggaacatatttcccaaaatattcaaggtataatagacctggagttatagatttattaaagaatgtatctgaaaaatggaatacaagtagggatatattaataaaatctggagatgaaataatagaagctcttaaggatgattttggtgtaaaaaatactgagggtgatttatcaaaagagatgttgagttcatcagttagagtatttaaggccatttatgatgaaaagtatggtggttttggtaatgctcctaaatttccaagtcctcagaatcttatgtttttaatgaaatattatagcatagaaaaagataaagatgtgttaaaaatggtggaaaaaactttagatggaatgtatagaggaggcttgtttgatcatattggatttgggttttcaagatactctactgataaaaagtggttggctcctcattttgaaaaaatgctatatgataatgctatgcttactatagcttttttagatgcatataaaataacaaagaaagagttatataaagaaattgctataaaaactatagattatgtagttagagagatgaaggataaagaaggtgggttttattcagcacaggatgctgatagtgaaggtgaagaaggtaaattttatacatttaatcctcttgagataattgaagttttgggtgaagaagatggaactttctttaataattattttgatataactagtagtggaaattttgaaggtaaaagtattcctaatcttataaaaaataaagaatatgaaagacataatgaaaagatagctgaccttagtaaaaaggtatttgaatatagaaaagaaagaacatctttgcataaagatgacaagatacttacatcatggaatgcattgatgatagttgctttaacaaaggcatatagtactttaaaaaatgacatatatttagagtattcaaataagtgtcttaactttataaataataatcttgtaaatgagtcaggtagattattagctagatatagagatggaagttccgactatttagcatatttagatgattatgcttttttaatctgggcgtatatagagctttatgagtcaacatttaatatgaaatatttagaaaaggctttaaatttgaatgaaagctgtatcaaccttttttgggattatgaaaaaagtggattttatatatatggtaaagatagtgaaaatttaatagcaagaccaaaagatttgtatgatggagctattccatcaggaaattctgttcaattatacaatcttataagacttgcgaaaattactggagataatagacttgaagaaatgtcatataaacaattaaaactgtatgtggataatgtaaagagttctccaactggctacagcttttatatgctttcattgatgtttgaactttattctactaaggaaattatatgtatttttaaggaagattctgatttaattgcatttaaagaattgataagtgaaaattttataccaaatgcaacttttttagcaaagaaatacaatgaagaaaacactattataggttttttaaataactatagattgaaggatgataagactagttattacgtgtgtcaaagtaatagttgtagtcaaccaattaatgatttacaaaaattaaaagatatgattttaggagtagaataatcataatagcgaaaaaggagatgctttaaaataaaagtctaatcatctcctttttttgtacaaaaaacagaaaaagagttcctaagaacacctaatctatgtaatgattgttttgttaaaaaataaaaatgacattatagttatataaaatattgtactataaaaaagtggtattatagatgcgatagtattaatcgtttttatttaccctatttcttctttttgcaaattcttcaagtgcttcagatttaattttatctatttcttcatattccataaaattagcatcttcttcaaagccatcttgttcttcaccattaaaacgatacattttttttagtaaactccataaggtctctaattcatctttggtaaattcgtgaaatacatctgccataaagtttattccagtcctactacatgttaccataaccttttttcctaagtctgtaactttaacattaattgctctcttatcatgaggacttggaattacatcaacatatccatttttttcaagattagcaactagtctatttatattttgtttacttgtacccatttttcttgcaatattatttaatgttgtttcttcctctggtaaatgaagaattgataaaatagtcatatactgtcttgaagtaagtataccaaaatatttatctccttctatttgtattttgtttgtaagggtaaaaagagttgcatatgtttgattcattaaaaagagctcttttagttcatttgaataatccatgaaatatatctcctttatttttagaagttgttttgtcgaaaacagaatatcatgaattaattctaatgtcaatatggtgtcaaaatatattaaagtattacttttttatgtaactattaattaaattattgtataattgtatgtaaaaacttctatgtaccaatgataatttctatgaggaattaataattcttaaattttttagaaagattttgacttgaaaatacttgtaatataatatataaattaatatactgaataaaatcaatctggagggataattatgaagtgtacaaactttactttcaaaggagaggaaggtttagatatatatacatataaatgggaagatgaaaatataaaaaaaccaaaggcagttatccaaattgcacatggaatggctgaaactgcacaaaggtatgagacttttgccaaggtacttactaaaaatggttatatagtatatatcaatgaccatagaggtcatggaaaaactgcaaagataatagaaaatgttggacatttagctgaaaaagaaggatttagatgtcttgtagaggacatgtatactttaacaaatattataaagaaagaaaatgaagatttgccaatttatctatttggacacagcatgggttcatttgcaagtcaaagatatataatggattacagtaataatttatctggtcttatactatgtggttcaaatggaaagcaaggaatcattctaaatcttgctcatctgataatcaatcgtgagattaaaaagtatggaagacgttctaaaagtaataaaataaataatttgattaaaaaatagctatgcacacttgtgactttagtcatgagttagtagctaaaatagtcagcatatagggaaacctatatgtagagataggatagaacctatccaatactacttgaattgctggaaacctctaaagctaaccaaactaaaacataaggatgaaataaacctaagtgtgaaagttacgaaagtagaaaaaattggttagatggtataaggttaaaccctaagtactttaaaatgggcaatcagcaggtaagctccgaataggagaaacttcaacgactattcctcttgagggaagtacactacaagttattggtagtggaagtgggtagaccttagcggataatgccgaaggataagatatagtctgtgcttacatgaaagtgtaagaagttcataagagaactgcataggtagtagcgaacttatgtgaacgacaacctcaaaaatgataaaagttaagaacttacggttcttatatatgttatttaaaaataaatataaaaaaccttcaaaatacttgttttaagtaattgcatattttaatattatgataggtgatgaaaaatggaagttactcatggtagaggatatgcatataatatgtcaaatatagacatccagtattatggggagacatctttggaatcatagttatttcgttgctactgtatcagaaaatacagaggagcagataagaaaatatattaataatcagaaaaaacaagtaaagtgaggtggcagtagtggaaaaagcttataagtttagaatgtatccaaataaaaaacaacaagagttaattaacaaaacttttggatgttgtagatttgtatataataagtatcttgctaaaagaatagaagtttataaaaacgataaagaaacttttacttataaacagtgtagttctgatttgaccaatttaaaaaaagaattaaagtggcttaaagaacctgacaaattttcactacaaaacgccttaaaagatttagaaaacgcatatgaaaaattctttaaaaaaaggcacgatttcctaaatttaaatcaaagaaaactaatagattttcatataaaactaactttacaaatggaaacattatgtattgtggtcaacatataaaactacctaaacttggtatggttaagataagggataaacaagtacctcaagggagaatacttaatgctactatatctaaagaaccaagtggtagatattatgtatcattatgctgtactgatgtagatattgaagcatttgaaaatactaataatcatataggtttagatttaggaattaaagaattttgtatctcaagttgtggagaatttatagaaaatcctaagtatcttaagaagtcattgaacaaacttgctaaattacaaagagaattatcgagaaaaacaatcggtagtttaaatagaaataaagcaagattaaaagttgcaagacttcaagaacatatagctaatcaaagaaatgattttctacaaaaactatctactaaattaataaaagagaacgatattatttgcatagaagatttacaagtaaagaatatgattagaaatcgtaaactatctcgcttaatttctgatgtgtcatggtcagagtttattcgtcaattagaatacaaggctaattggcatggtagacaaattgtaaaggtaggtaaattctttgcaagttcacaaatatgcaataaatgtgggtataaaaacgaggaagtgaaggacttaaatataagagaatggatttgtcctagttgtaatgaaattcacgatagagatataaatgcaagtataaatatattaaaagagggattaagactaataacaattcaaaataaataacttatgtaagaaccgtaggaactacggggatagcctgtggagaattagtaagacatattttagtatgcaaaattctgtgaagcaggaaccctgtgactttagtcatgggaggttcagatttggtggcaaaataataagaagaaatgaaaagactaagtttgactggttaagtagagataaagaacaagttgaaaaatatataaatgacccattttgtggagtagtgtgtagttgtggctttttttatgatttagttcaagggttaaaagaaattgaggataaagaaaacttaaaaaaagtgccacttgatatacctatttacataatatctggagataaagaccccataggaaaaaatggtaaaggagtcttaagactaagggatagatatataaaattaggagtaaaagatgtaacttgcaaactttacaaagatggaaggcatgaattgttgaatgaaataaatagagaagaagtttttgaggatataatttgttggttaaacaataaaatagaaatattgtaataaaaaaatataatgatatatttgctttaaatttatttatatataatatttgaaaagtggattatgtatatgcaaagtagaaaagagagagcctagaagtgattttttgctataatgccatttattgaataggtgggtgttattataaataaattattaacactcagtattattatcattgtatatggaatttattttatttaaaattccttgaaagtttaaatatagtaagttgtagtaaagagaaaatctaaatatttaaatgctatttaatgtgaatctattaattaggttatacttaaacttaattaatagattttatatttcaagccaatgagatagggttttagattaaaatataaccaatggttaaattacagacattttgttaactttccctcgatttactagtaaatattttttttatatacttaaattacaacagatgtactagggaggtatatatgcaaattaaaataggtaaagtcatacagcgtcttagaaaagaacgaaatttaactcaagaacaattagcaaagtttataggtgtgtcaacaccagcagtatctaagtgggagagtggaaattcttacccagatatagaattattgcctttattagcagacttttttaatgtgtctattgataagcttttaaattacaagattgatttaagtgaagaaaaagtaatgaaaatttataaagaattagaatcaggctttgctagaattgaaattgatttatcaacagaagaaccaaaagaagaatttagacaagacttagaatctgtaaaaaagctttctaatatgtatatagagaagtatcctaaaagctatttattgaagctaaggatatgttcgctgtatcagatgtattcatataaatttggtaagagtgaacttaatgacagagtaaaagaaacaacgaatattcttgaagatatagtgagaaatacagatgatatccaaataaaagaaacagctcttattatattatcaaacgcatattgtatgttggaagattatgaaaaggcagagttgtatttaaatatgatacataagtcaataggggatacaagtgttaatttagctatgatatatttaaagcaaaatagacttgaagaagcagaaatattgcttcaaaataaattgtttagtaatatatttaatataagcatggattgtaagggaataattaatgtatacaaaaatcaatacaaggaattaaagaaaaaattggagaatagaaattttaataaaaatgcaattgagagagaaatggagtatataaaaaataagttgctgtggtatgcaaatctttctttagaaataaaaaaaatgctcagtgaagataaaggtgcattttttagtatgtatgtggattatatggaattatctctaatttttttattttttaacatgaaagaagaagcaaaaaaagccttatatagtctaaaagaaatattagaaaaatatcctatacatgaaagtttggatgtaagtcaaatgagattttttgataaggtagagtctaaaaatttatatacttttaatatatatacaaacttgttaattgtacttaatgatgacagttataatgagcttagagaagaaccaatttttaaggatgtaattgaaaagattttagatatggaaaaaatgttgaaaaataaagaataagtaaaaatttaatataggacttaaagattaatcaaattaaaagaaagtgtttcaaaataaaaatttgaatcaccttttttgttggtcttaaaccgttatttagaaaaatagaggtttcaaaatagaaatctgaattatctgtattattacacaaaaatagaaacctaaatttataaaaatagaataaagtttgttatataaaatgtaattttgtctataaaatctcacatgttttcttaactttaagcgtgaaaaagaggatgtatcatgaattttttagttcatgatgcatccttatttgtatgaaatccaatatatctttattatttaaacaatggaaaagagtcttatttctattttgagacatctcttttatttaattatgaagttttatacagttcaataaataggaattatatttagaaactcatgacattatttcttagatagtgattaaatttatcatattccattttagataacttttctgggtaagacattacaatcaggttatgcccattgaatttttcatggtatggtggatgaatgtgttcataattatttgtcttatattttactctttcatagaacgccttgcgataaattgaaatctcatcaattggaaggtcaatttctaaaataatagtttttcctttcttatttaaaagctctaacgctctttgtccatatctattattgcgcatttctggaaaaatgcagaaatgttctacatagataaagttatctgtttcccaacataaaattatgccgacaaactggtttttatcataaattaaattgaattgatattctttatttttcaaaatttctgtttgcaaataagattttctttgttcatgaaatgggaaactaattttatataattccatagccttgtaatataatttattttcactggttcttaaccgttcaaatttcactttactcctcctaatcacgaaaattccaatttatttatgagttcattttaccatagtcagtatttgcatacaatgtgttttaagttgagtgtcatttctttcttttatttatgcttatatctcatagactaagagataattgcttaagacataactaaaaactattatattaagctttgataatctaaaaacagtatatttatggacttttctaggtctaaaagtaatcttaataattttagaagttacaaaaaagttacataaatttggaaagctataatatacatatataatataaggttaaaactgtaatgaataatattaatttaaaatttgaacatggaaggagattattatggagaaaagagaaaagaggataataatatcatctttattaagtgtatcaattttaatgggtttggtaagtatatattctatattaaataaagaagacataattttaactgttaagggtcaagagcaaaaagtatcttcctttaagaaaacagttgaggaacttttggatgaacagggtgtaaagtataattctgaagataagattaatccaagtttagatacagaactaaaagatgatatgaaaataaaagttgttaaggtaactaaaagtaaaaaagaagagattgaaaaaattccatttgatacaaagcatgtaaatgatagtaatttgttaaaaggaaaatctaaagtttatcaagaaggtcaagaaggagaaaaaaaactagtctataatttaacttaccatgatggaaaattagtcaaaaaagtcttatcaaaagaagtaatatctaaggagccaactacaaaaattataaaatatggaactaaagaaaaagtactaatagcatcaagaggagcaaatataagaggaggcaaacatatgaaagtggttgccactgcatatgcaggagatacaataacatctactggtacaactccaagatggggtgttattgcagttgacccacgtgtaataccatatggaacaaaagtatatatacctaaactgggtatgacttttgtagcagaagattgtggaggtgcaattaaaggtaatagaatagacatttttatgaacagtgaaggaaaagcttcaaattggggaaggaaaagtatagatatatatctacattaaattagtgaatagaataactttacttgaaggacaaaaaagtataaaatatgaattaactaaactgttagattattcttaaaacataaaaatatatctaaggggggataagatgaaaatagtctgcttaggagacagtttaacgtatggatttggagtatcacgaagtaattcatggacaaacattgtaaatgaagagactcgattagaaatagtaaataagggtataaatggtgatacaacaagtggtatgttagctaggtttaatgaagatgttgtaaaaaactctcctgatatagtttttataatgggtggcactaatgattttattgctggtgcgggaaatgaaattattaattctaatataatggctatggtgcatcagtcatattcaaaaaatattatacctataataggtataccattaaaaccagatattccaaatgttagggaagattggagttgttttactgattttaatatagtatctcaaaacttagaatcatatagttattggataaaaaaattttgtatgacatttaatactaatttcgcagatttttattcagaatataataaaaatatggaactagaaggatataaaaaattatattttgatgggttacatccaaccaaagagggtcatagaataatggcagacatttttattaattcaattaataagtatatagaagagttatagattacattaaaatgcttgtttatgcgtcagttgcaataaatacatacagtagagaggggtttattatggattatactaaaacttatgaagagtggataaagggttcatattttgatgaagatacaaagctagagttggagaatataaaaaataatgaaaaagaaatagaggatagattctataaggatttagaatttgggactgcgggtcttagaggaataattgaagcaggaacgaatagaataaataagtacacagttagaagagctacttttggattggcaaactatatattagaaaacacaacaaaagaagaaacaagtagaggagtagtaatagctcatgataatagacacaagtctagacaattctgtatagaatctgcaaatactttggcagcatgtggtataaaagcatatatatttgatagtttgagaactactccagaattatcttttgctgttagaagcttaaatgcaatcgctggtatagtcataacagcaagccataatcctccagaatataatggatataaggtatactgggaagatggagcacaagttatgccagagattgcaaatgcaataacagagaaagtaaatagtatacatgattatagtacaataccaaccttaacggaagctaataaaaatttggtagttttgttggacgaatcacaagatactaaatttatagaagcagtaaaaagccaaattataagaaaagatttagttaaaaatgtaggtaaaagctttaagatagtttatacacctctttgtggaacagggaatgttccaataagaagagcattgaaagaagttggttttgaaaatataattgtagttccagaagaagaaaatccagacccaaattttgcagggcttgattatccaaatccagaagagaaaaaagctttaaatagaggtatattactcgcaaaagaaaaaggagcagaccttgtaatagcaactgacccagattgtgatagagtaggtgtagcagtaaaaactactacaggtgagtatgctttacttacaggaaatcaaattggtggtatgctgacacattatataatagaaggattaaaagaaaataacaaattaaaagaaaatcctacaataataaaaaccatagttacatcagaatttggagcagatatagctaaagcaaataatgttgatgtattaaatgttcttacaggttttaaatttattggtgaaaaaataaaattatttgaacaaaataaaaatagaagttatgtatttggatatgaagaaagttatggttacttagttgggactcatgctagagataaagatggtgtagtttcttcattgttaatatctgaaatggcagcattttactattcaaaaggtataagtttatatgatggtttaatagaactttataaaaagtatggatttttcaaagaacagactatatctttgactttaaaaggtatagaaggtgtagaaaagataaaagaaataatatcttattttagagaaaatcaaattgattatataaatagtattaaagtagttgataaaaaagattataaaaatggtatagataatcttcctaaatctaatgttttaaaatactttttggaagatgaatcttgggtagctataagaccatctggaacagaaccaaaacttaaattttacatagctgtaaaaggagctagtgatattgaagcagataaaaagattcaaggtttgaaaaagtatatagatgacatggtcgaaaaattaaaataaaatattattattttataagataattttgtaataatatttatttagctgaaaattataatttactttcattgagtagaatatggaaatgttagtagaattgttattttcagcttttatttgtgttatttttacttaaataattatattatagaatgaatctgagtataattaatattgtataatgaaattaatttgatagaaaaggggatatttatgtttggtatagataagaaattgattgaatatataattgcaaaatccaattacagtgaattaagttcaaagtcagcagaagtatctttcttcttaatgttgtccatatttccttttttaatatttacaataagttctatagcttatataccgattcttcatttaaataagtatatagctttgtttagaaatatgatgccagaaggtgcttttgctgtgttatcttcaatcatagtttctgcaatagacaatagaaacctgaaatttttagcagtcagttttgtacttactatgtggacattttcaagagcagtaaaagctcttattaaaggaatgaatagagcctataaagttaaagaaactaggtctttttttaaaattttatctatatcatttttatttacaataatgcttttggtccttatttttttatctatgatatttttagtttacggggaaaaaataggttattttatttttaatcttgtaggattggatgagatatttataaaaatatgggatattctaagatacactgtaggtataataacaataatagtgatatttacacttttatataaatacactccaaataaaaagttaactattaaagaatctgcgccaggtgctatttttgctacttttgcttggtttttagtatcatttttatattcttattatacaaattactatgctaactatgaagtaatctatggaagtatagctgaaataattgtacttatgacctggatgtattttagtagttggtctatcgttattggctatgaggtaaattcaagattgtattttagaaagataagacatgaaatgttaaagtaaagtatttaaaataaaagagagtatttagtattataaatgtaattgaattaataaagaaatattgacatttaagttaaaaagtctagaatttttctgggctttttttatttttagtataacttgacaaattttatttaatgggatagttttaatttataatcatctttgaaaagatgactattgataagtaaggtataaaattggtaagtatcaaaaaatatactaaataaaaattatagtcctaatgagttaatttctgtattttcaaataatgcagtatttagtcatgtgtttttatatgcgcctgtatttccaattaccaatatattagaataagctactgtaattagatttagaaaaaagcgacataaataattataaacaaataataaattacataaaattaaatttattcacaagtatatcttataaaatatgttataattaatagaaaattgtcatataattaattaagtagtattattataaataacattgaaaggtagtggttagaatatggatatccataataaatatgtaaattttataaaaaatatacctgtaccttttttatattgtagaattgtaaagagacaagaagatatagaatatcgagtagaatatataagtaagggtatgggcaaagtattacaattagaagaaggtatttgtgataaaaatatactagatgtattgcctgtatttaagtctaaaaaatatttcaaagagttgttctcaaatgaagtggattgtataaaaaggtacattccgacacttaaaaactggataaatataaaaaaacagataataggggattcatacataattttgtattttggtaaaattgtatttgattatagacagataatcgattcctttgataaaaaggaaaaagtagcttatattaaagacgaagaaggcatatatatagattgcagtgaaaatttaataccaatattaaataacaacattaaaacaacgaaagatatctttggtaaaaatgatatagaagtatggggagagaatacaggaaaattatttagagatgattatagaggaggagtatctagtaaaaaaagatttttacaaaatctttttgaatatgaagaaacattttttatggttgaaaaatattttttgtatgatgaagacgaacttttaggtactatagggataatagataatataatatatagtggttacagtaatagaaattataactcaaaagatttaatgaagatgatagaacactcaattccagagaatatgttttataaagatgtgtatggaaattatattggatttaattcaggttttttgaatttagcttgtatgaataaagaagaattattagggaagaatagttataaaatatcagaagaagaagctttaataaataagatatttgaaagtgataagggtgtagttgaaaataaaaaagtagttacatttgagttaaatgtaagtataaatgatgaaaataagtgtattgagattacaaaaaggccgttttttgatagctatggaagtgttattggaataattggaacagcaagggatataagtagaagaaaaagattagaagaggaaatggataaaactaggatggaattttttgcaaatttatcccatgaacttagaacgcctataaatttaatatcatcttcattacaagtgatagaaaaaaaagaagcagatttaatagaatcaaatgatactttaaaaagaaatttaggtataataaaacaaaatggaaatagaatactgaggttagtaaataatgttatagactttacaaaaatgcaatcaggatatttagattttaaaccagaagaatctgatataattgcatttatagaggagatatgtatgtctgtagctgattttgcaagccaaaataatatacaacttacatttgatacagaaatagaagaattttcaatgttatttgattcagaaaaattggaaagaataatattaaatttactttctaatggaattaagtacaataagaaagatggaaaaataaatatatttttatatgtgaaagataatgtatttaatatgaaaatatctgatagtggaataggtataccaaaagaaaaaatagataaaatatttaatagatttgaacagattgacaatgaactttcctacagagttaaaggaagtggtattggactttcattagtgaaatctttggttgaattgcatgagggaagtatatctttaaaaagtcaacttggtattggaagtgaatttatagtttcattacctgttagaagtgaaaataatattgaaaaatataatcataaaagagaaatcagcaatgaactaagtaaaaaattagaaatagagttttcggatttataagtttaaatataaaaaataaaattttaaaaaagtattgacaattgatttagaagggtttaaaataaattacaacataataaataaaaaggcgatgaataggaagagtaaatctaattcgattaccagagagaagagtccattggctggaagactttttaaattagagggattgaaaactacctaggagctactttctgaagtcatctgcattagtagattttagtaagaatagtcgttagctgcgttaaagtgtaaagtgagttttcatgatatatgaaaactaaattaggtggaaccgcgggaataatactctcgtccttatgttataaggatgagagttttttgttgtttaaaaatataaacagtaatcataataattatagaaaatataaaagcgatgaataggaagagtaaatttaattcgactatcagagaggaaagttcacaggctgaaagactttctaagtttgagaaattgaaaactacctaggagctgtggtctgaagttactttaaaaagttttagtaagactaaccgttaactgcgttaaagtgtaaagtggattttatcaataaatgataaaatcaaattgggtggaaccgcgagtatagactcgtccctttatatagggatgagtctatttttattgcaataaaagattgaaaataaaaaaaaatcggaaaattataaatttaggaggaaaataaaatggaaaataaagtgaaaattggagtactaggatatggagttgtaggaagtggacttatagatataatagataataataaagaaaaaagaagtatagaaatagttggaattttagttaataatttggaaaaacataaggataaaaaatattctaatataataactaataatatagatgatatatttaataaagatatagatatacttgttgaagtcatgggtggtttagaaccatcattatcttatataaaaaaagcattaaacaataaaattcatgttgttacagcaaataaagatttgttagctgaatgtggagatgagcttgcaaaattagcaagtgaaaataaagtaagtattaaatttgaagcttcagtcgcaggaggtattccagtattaaaaccaataatagaatcactagaaggaaataatatagatagtataaatgcaattttaaatggaactactaattttatattatctaaaatgtatgatgagaatctatcttatgatatggcattaagacaagctcaagaattaggttttgctgaagcaaatccagagtcagatgtattagggtatgatgctgctagaaaactatcaatattatcaactctagcttatgacaatagagtatattggaaggatgtgtatttagaaggaattacagatatagatgaaaaagatattgaatatgcaaaaaaattaaattgtaaaataaaattgattggtcaaagtaagtatgaaaatgataaagtaagtgcttttgttagacctgttttagtagaaaaagataatatccttgctagaatagacaatgagttcaatgctgtcatagtgaatggagattcagtaggagaagtttcttttgtaggtaaaggagctggaagtttagcaacaggaagtgcggtttattcagatgttatagatataatagataatagagtttcaagtatagattcttttactaaagataaaatacaagttaataaaatagttagagaaaagtgtggagcacttcttagatttaaaaaatgtaataaagatgaaattctaaatatagttgagaattgtttagtaaaattcgatattttaaatgatgatgatgaacttgctattatggtttatgctgattctgaatatgaaataaacaacagtttatgtctaataaaagataaaggatattgcgaaaaaatgaataaaatgttgaaaataagttaaaaaagaaaaaataagtttatatgtaacatattttgacgattttaatactatatagtatgagatgaaacaaaacatctcataaaaaattaaaattcaagggagagatatgttatatggaaaataaaaaatatgcaaatggtggttattcagaagactggtatgaaagaggagaatctacagctaaatggttccagaatgatagagaagaatatgaaagagcagcatacgatgaagatagagaaagaagaggctcaaactgtggatgttcagattcaggaggaaatagacctagaaactgtgaaagatttagaagagaagctgagataagagaaagagaagcaagagaagcattctgtgaatcttcagagagaaagaaagaagcactagcatatgaatgtgaagctagaaaattatgggaagaagcagaaaaatactgggatgaatattcaaaatacaactataaaggaatcgaatatttagcagaagctgctagattatttgatgaaggtatggaatgtgaagctagaagaaatggaaataatggaggaaacaataataattgttgccataaatgccataaatgtaattgtaactgctgtagaaaataaaaaaattcattgacaaatcaatagttaaaatatatcatattatgtataataaagagaaaattcagaaaaaaataatgattagaataaatttaagtatatttattagacaaatagtgctcagttagtgaggtgagtacaatatgattaaactcccatcctctagcttttgatagagggtgggagtttttatttattgatatatcttaaatgaggataatattgtaaaataaatgagtatgagattgtaaaattaggaggtaaaaaatgaaaagtattaaaacatcaagtatgaaagaaaaggtagatgaaaagatattaagagagcaagtaagttctataatagaagatataagaaataataaggatgttgcacttaaaaaatataatgagaagtttgatagaaatacaagagatgaatttagaattactaaggaagaaataaaggaagcttataagcatgtagatgacgaatttataaataacttaaagattgctgccaaaaatataagagaatttgctaaagctcaaaaactaagttttgaaaacccttttgaaaaagaaatttatccaggtgtaatcttaggtcaaactaatattccaatagagtcatgtcttgcatatgttccaggaggtcagtatccattgttttcaacagctcttatgcttataatacctgcaaaagtagcaggagtaaaaagaatagtggcatgttcaccaactatgaaaaatactgaaaagataaatcctaaaacattggtagctatggatatagcaggtgctgatgaaatatatgcaactggaggagttcaagctatagcagcatttacatatggaacagaaaagattaatccagttgacataattgtaggaccaggaaataagtttgtaactgaagctaaaagacaatgttatggacaagtaggaattgattttgtcgctgggccaagtgaagttcttataatagcggatgaaacttcaaatccagtttatattgcagctgatttattagcacaatgtgagcatgatttaaatgcaagaggaatattattgacaaatagcttggaagtagcacaaaaagttgaaaaaaatatagaaagtatgctaaaagatttgccaacaaaggacatagcatatagttcatgggaaaataatggagagataatattggttgatgatatggaagaagccattaaaataagtaatttttatgcaccagaacatttagaagttgcagtaaatgagtataatgatatttgtgatagattaactaactatggttctttatttattggaaatctttctgctgaggtgtttggtgactatgtttcaggtaccaatcatacattaccaacacttaaagcatcaagatatactggtggtgtttgggttggaacttttatcaaaacttgtacaaagcagatatttaatgaaaaagctatacaatcattagcacctgtagctgaaaagctggcaaaagaagagggattatatgcacatgcaaaggctgctgaggttaggtttaaaaagtagtaaaaaattttattttggcagtcgagatttagtattagactgagataaagaaaacgctgagaacctgaataaatactatattttgtgggcctcggcgtttcttttatatctgtatataataggataatactacctgtgtgtttaaatgctaacttaatatttcttttctaaataatgtttatgaaatagttaatatttttagttaatacttgaaaaaaacttttgctaactgtgcaaattcatctgcatttgtcaatatagcagggtgtcctccctgactaaaaatgtgaatacttgcttttgaaataaaagttgccatttgcttgtactcttcttcaagattatgacgacacatttcgtcttccttacttcctgtaaataaaattggcatttctaatttacacaattctttatgaaataaagggcgtttcttgtttgcacattgcaatagagcttttgtatcaagattaacaacattctcccaatcttttccatgacaccattcatagaattttcgtgcttgaatatcttgctttgatttttcccttccagtgattagattatctatgaagttatcattaagagtacgtccatcaaagctatctgctataattgcttcaactaaatcgggacgttctaatccagtattaacagctgcccatgctcctccacttgttccaattaagccaactttaccacaattcaaatgttcaatcagtgctattgtctgtaaggcttcatcatgccatatgtcaggagaaaattgagaaactctatcagactgtccattacctaaaaaatcaattaagatacatctaaaattttctacatataatggcacaagtgctttaaacatattagaagaaccagtattaccatgcaggaaaattatcggtttaccttgtccatattctttataaaaacaagaattaccttgatactgaaaatatgacatatattttcctcctttttatttgttaagttaattataacaatataggtatgaatgaaaaacctcatgttctttcttagaataaaaatgtgccacgcataaaacgtgacacatttctaattataaattttgctgtttaagtattctttgtatgcttttctctgtcaaaaagtatttctctgataactgcttgatactcattccattttggaaatttatacagatttgagaattacgagaagctaagacttgtttggtgtttgtgttttcaccccaatgctttttgtgctcttgctttttgggaatataaatcactttaccatctatatattcttgcacttgctcaatcagttctttaggcagtaagtcaatcgaattttgatagctcattttgcacctcctaaataattactctttaggattagcaaaggctactgctactcacaattaaaaataaaattttttattatgtacaatagcctttgctatgcacaagttccaattcccataaactaaatactcctttctggtttgaaaaattcatctgaacattgatttcgattttaagatagagttcaatgacaaatttacatttttattatatatattcagatagataattgcaactgtctttgtatgaggatattttattatagtcaatactataatatatatttatatcatcaaactaatatgaacagttgaaaggaatatgaacaataaaacttagtcaggaagaataattatgaagcagacaattgagaaatttgattttaaagttttattgaaaatttattgacaaatttaacttgtaaatattatactaaacttaataaataaagtttataaagtaaggtgttgtctatgaaaaatatagttggaaaaccgcaaacgataaaaaaagtaaatgaagatttaataaaaaacattataaaaaatgaaggtcctataacaaaaccagaaatttcaagcattactgaattgagtttagctacagttaataagattgtggagcaattagctttgaaaaatgaagttaaagtaagtggactaagtgaatctactggaggaagaagagctcaattatttgaaataaatgcaaacttagaacacataatagctttatattattatagaaattgttgtataggggtagttgccaatttattaggtgaaataatttatcaagaagaatttaatataagaatggatacatatgaaaacgttaaccaagatactttttttgttatagatactctaataaaaaaggaaaaaggaaacaatataagggctattggaattggtgtcccaggagttgtaaaaaaaggtgtagttaaaaatataccaactataaaaagttgggaaggtataaatttagaaaatttaataaagagtaagtacaatactaaagtgtttatagaaaatgatacaaatattactactattgggatttatcaaaaacagtataaagacaaatataaaaatatggctcttatgtatttagaagatggtattggttcaggtatagttataaatggtgaattgtatttaggttctacaaattttgctggagaattaagttatctaaatatagaatttggtaagtataactctaacaacttaaatcttgaagattatattatgagtttaagaaaaagatatttagaaagtaaagataataaatttaagaaagaaattttatctataatatcaaactttataaggactcttgtatgtgtcctaaatccacaagctatgattatacagtgtagtatattaaccaagagtgacatggagtttatagaaaaagatgtaagtaataatgttggagaagaaaattttcctaaattaataaaagtagagtcattgagagaaagaagtataaatggagtaattagtatgtgtttaaaagaaactgactatcaatattccttatctaataaaaaaggaggatattaatgtgaaatatttggtttcaatagatggagggggaacaaaaactaaattttgtgtaagtgacttagatggaaacatacttaaagaacataccactggttcaactaattataagtcagttggaattaaaaaaacatatgaaaatattaataatggacttaaaaaaatattaaaagatttatatatcgattatgacgatattgagtacactgtatttggtatatctggttgtgattctcctaatgattataagattataatggatgaaatattaaaaattgggattaacaaagaaaaaatatatctggcaaatgatgcagttttagctttttatgcacaagctgattcccctggtttagtaattgtggctgggacaggttcaattatactgggaattaaagaagatggagaaatatatagagttggtggatgggggtataattttagtgatttgggttctggatatgatatagggagaaaattattaaagaaagtattgctttattgtgatgaatgtcatgagtatagtgatttatttagttgtgtcttggatttctttggagcaaatagttttgaacaacttgcatatatgattactgatataaacaataatgttgaaatagcaaacctagcttcattagtgattgattgtgccgaacaaggtgataaattagctattgaaatattaagagaatcatcaactgaactatctaaattagctcaagtaatattgagaaaaatatctaatccaatgaaaatagataaaagcgaaataaatatagttttgtctggtggtacattaaataaaactgtatatgctcaaatgttaatgaataatttaaaaacagaaaatacagataaaaatttaaaatttatatctcaagaaaatcagccagtatatggggggataagacttgctatggcattagctaataggagagttaagcatggatagaaaaaaggtaatagtacaaatttttactggaggttttaaggctaaagaaataaagtttaatgatataaaatgtaaactactagaattattggactgtattgatatagaaaaggttatcatgggatggagtgtagatgaagaattatatgtagaaactaaaaaactattaaataaatataatgttgaactatatctttggttgccatgtttttctgaaataggattacttgaaaaaagtaatttactaattgattatatggggaaggaagtcaagggctatgctttacaagaggatgaaaattttgaattttattgcccaaataataaggaaaatataaaaaatataaagaaaatatatagtacttattttagtgatattaaatttgatggaatttttttagataaaataaggtatggttctttttcgaataaactaaatggtgtttttaattgtttttgtaaagattgtttaaatatatatgaaaaaaataatattgataaaaagtcgttaatgagagaaatgaataatgtgtctaagggagttatagataatgaagatactccatctggtataacagaatacattaatggaaaatacaaatttaaaaataaaatatgggaagatttttttgaaacaaaaaatcaaaatatatacaagtcattattagagataagtagttattttaaaagtaagggattgaaaataggtatagatactttttctccttttatttcttactttacaggtcaagatttaaaaaaattacaagaagtagcagattttataaaaccaatgatgtatagaactacaaaagctccagctggtttaccatttgaatttgaaaggtttattgatgaatccatacataagaataaagagattggaaaaagaaatttcttagatattttaggaattaaagagtatgaaggagatgtatatcctatagaatttgtactagaggaaatcgattttatgacaaggaatcttaataaagatatatatgtaggagttgaaataaataaaaaggaaattatagctcctgttacacctaagtacataagtgaaaatatttcaaatataaataagacaacagtaaaaggatatgttttatcttgggatttgttatcagcaccaaaagaaaatattgatgaaattataaaatggtttcggaattagtgaggtgatatagtgagtaagatattagaaatgcaacaaatatataaaagttttggaaaggtagatgttttaaaagggataaattttgagttagaaaagggagaagtaagagctcttttgggagctaatggagcaggaaaatctacacttattaaaattttaggaggagttcattctcaaactaaaggtaaagtaattttgactggtaatgaaataatgtttaaaaattcacatcattctaaagaaaatggtattagtataatttatcaagaattaagcttgataccaacgcttacagtacttgaaaatatttttcttggtagagaaattttaaaaggaagtgtgtttttaaacaagaaagacatgcttgaggaatatatgaaaatttgtgaggattttgattttaatatagacccacatacagtagtttctaatttaagtgtagcaaaccaacaaatggttgagataatgaaagctgtttcatgtaattctgaaattatcataatggatgaacctacaacatcacttactaataatgaaaaagatgggctatttaaaataataagtagactaaagtctaaaggtaaaacaatagtctatatttctcacatattagaggaagtttttaaagtatgtgatagtgcaagtataatgaaaaatggaattatgattggaacttatgatgtagaggatttaactaaattaaagataactcaacttatgacaggaaatgataatcacaaacttattgagaagaaggattatacatttgcaaagtatgaagagccaccagtactagaagtaaagaatataagctggtctaacaaaataaaaaatgtttcatttaaagtttatagaggcgaagttgtaggtcttgctggtcttgtaggttcaagaagaactgaaattataaatttgatatttggtatagataataaagatagtggagacatttttatcaatggtaaaaaagtagacataacttctcctaaggttgctataaaaaacaaaataggattgattcctgaagatagaaaaaatctaggattaattttagaacaagctatatacacaaactcatcatcagtacaaattgataaattcaagaaatttttgtttatagatagaaataaagaaattgagttttctaaaaaaggtgttaaggaattaggaataaaagttagtgatgtaaagcaagaagtaaaagagcttagtggtggaaatcaacaaaaagtagtagtttctaagtggttagagaaagatttagatttaataatatatgatgagccgacaaagggaatagatattgctgcaaaagaagatattttcaatacaatcaaagaattttcaagtgaaggaataggagtaatatttatatcttctgatttagaagaagtaataagagtaagtgatagaattttagtaactagagaaggttctattgtagatgatttaaaaaatgagaatatacaggttcaagatataatgaacagtatatttaatgtataaaaaatgaaaatggaggactgagatgaagaaagcttttgagaagttaaatttaagagattatggagtattattaggttttttagctttatgtatagctataagtattgcaactccatcatttttaggtaaacaaaatatacttaatcttttacgacaatcttctataattggaataatttcagcaggtatgacttttgttataatatctggaaactttgatatatcagttggagcagtagcagctcttgcaggtgctataacaatgaaatttgcgactggtggaactaatttgtttgcatccatgctcttaggtgtagcgatttgtgcagtaataggattaatcaatggtatagtagttgcaaagataaatgtaccatcattaatagcaactatggctatggtcactattgtaagaggattgctgttgatgcttacaggaggatatccaattactgaaaatataccaatacttgattacattggaaatggatatttgtttaatataccaataccagtagtaattttctttatagtggtgttagtttcatttattgtacttaataaaactaagtttggtagatatgtttattctgtaggagggaatcaagaagcaagtaaacttaatggtataaatgtagattctcacaaagtgaaagtgtttattattaatgctgtacttgcaggaatagctggaatcgtactaacaggaagacttgggactgcaactgctattgcaggtgaaggatatgatatggatgcaattgcatctgtagtaataggaggtacatcagtggcaggaggttctggttctgtacttaaaactgttataggagtattacttatgagtgttataaacaacagttttaatcttcttggaatagatgtatatttccagtacatatttaaaggattaataattttagcagcagttggatttgattcttatagcaagaaaaaacttgcttcaagataaaaaataagggggatttttttatgaaaaaattaatgaaacatttagcattgttgttatcacttgttatgatatttggtttagttggttgttcaaatggtggtgacaaagaaaaaaatggagaaaagaaaatagcagtattactaccaggttcaacaggttactttgtagcaactaaacaaggtatagatgcaaaatctaaagaattaggtgtaagcgtggaatatgcagatgctcaatgggatgctagtaaacaattatcacaagctgaagattttatggctaaaggggtagacatgattgcattatgtggagttgattctgctgtaagtgagagaatagttaaagctgctaatgattcagacgtccctatagtagcatttacaaattctataggaagtaacccaactggagaatttaaaggtttagttacatatataggacaaaatgaggaggaaacaggagcactaactggaaaaattgctaaaaacttattaggagaaactggtgggaaagctgtattaatagaaggagtaccaggaactactccacaagtattaagaaaaaaaggtcttgaaaaagaattaaaagatagtaatatagaaatagtttataatcaaacttcaaattgggagaaagagcaagctttaaaagtaacagaagatttaattcaaaagaaaactgattttaatgttataatatgtcaagatgataattctgctacaggtgcaggtcaagctttaaaagatgctggtcttaaggataaagttaaagtcataggtttgggtggaagtaaagatggattaaaagctataactgatgggttaatagatggtacaacttatatgtctgctgtagaagaaggtggattagtcatagaaaaggcatctaaattccttaaaggtgaaaaaatagaacctgttacacaaattaaacaagttgaagttaacaaagataatatttcagagttcaagggtgaatggtaaattgtcatagataataaataagatttttagagttactttagaaactatataaagtaactctttttttaatttaatttagtgataaattattgaatagtatttctaaacaaataaaaaattaatataaacaaagacttaattatactaaattataagtaaaactaatataaacttatggaaaaaaggaaaacgtctaaagtattggaattactatagtgtaggtgtggtattaaaaaaacataaaaaaacataaaaaaattgttgaaaaaaatatagaaattttgtataattaaagatttgaaaagttcggtatacaaagccaattcttttgtatataatatatataaattcagaaaaaggaagggatatgtatggccaggcggttatttttagaaaggattggacttatatttttaggttcagcaatattagcatttggagtttataatttttattatttaaacaacataacagaaggtggagtgttaggtattttactactgttaaaaaatttattcaatatacaaccagcaatagcaaatgttgtaatagatggtttactacttttagtaggatataaatttttcggtaaaaaattccttatatattcaatagtagcttctataactttttcagtgttatatgacttatttgaagctataggacctctagtaccacaatcacaaaatatgcttttatcaactattttggcaggtgtaactgttggaactggtgtaggtatagtagtaaaagcaggttgtgcatcaggaggagacgatgctttagcattagtaatttctaagactacatctttgaacatagggcaagtttatttagcaacagatgttattgtattgttgttatcattattttatctatcagcgtttgatatcttttattctttgattgctgttacaattagtggcaaggtaattgattttatttattatcatggtaaaagtttggatatggatataagtaatgatatagttccagaatgttaatataaattaaataactttagattttattaggggtggcagatttgccaccttttttgtgtctaaatctttatagaaagtataatcccatctaggtttttgcaaatctcaaatatagaattatgttggaatgactgggaatacgattgctagatgtgcattttaaaaacccaattttatatttatgaaatactaatcattaatggatgtttcttaatcctatctttatacctaaaatgataagataaatgaagtagcaatacaaaactaaaatttgtaaaagagattaaattaaatggaggagctaaaatgttggatatagttatgatagcattgttattcataggatttgtttccatgaagttacttgctgattggtgtgggaaacaaactgagaaaaaataatgtaatgtatggagggattacctatgtggtttctggcagttgtaattataatgttaataatatatttggtatatgcgcttattaatcctgaaaaattttaaacagtataaggctaataagtaagttgaattggggggaacaatttttatggtgcagatagtaatagtgttagcgatttttatgattttagtaatacctatgggcaagtatttatatcatatagctactaatcaaaaaacatttggagatagactatttgataaagtggacaattttatatataaggtatgtagtatagataagaaaaaagaaatgaactggaaacagtatgcattagctttattatttacaaatgcagttatggtatttataggatatatcatacttagaactcaaagtatgcatatttttaatccaagtggaattaaaagtatggaacaaggactatcatttaatacaataataagttttatgacaaatacaaatcttcaacattattcaggtgaatcaggactttcatactttagtcagatgacagtgataatatatatgatgtttacatcagcagcaacaggatatgcggctgctatggcatttgtaagaggtctagtcggtaaaaagaaaacattgggaaatttttatgtagatttaattaggataacaacaagagtacttttaccaggagctttaattattgggcttatattagttacacaaggagtaccacaaacttttgctgggacagaaacagtgactactatagaaggaaagcttcaagatatagctagaggtcctgtggcagctcttgaatcaataaaacatttaggaacaaatggtggtggattctttggttcaaattcatcacacccatttgaaaatccaacaataatatcaaatatagtagaaatattatctatgatgatattaccaggagcttgtgttgttgcattcggtcacatgataaagaataaaaaacaaggttgggttgtgtttggcgcaatgtcaatcatatttttaataggtctagtagtgtgctttaaagcagaaagtgcaggaaaccctattttatcacaattagggcttaatcaaagtatgggaagtatggaaggtaaggaagttagatttggtatagcacaatcatcattattcacaacagtgactacttcctttacgacaggtacagttaataatatgcatgatacactgactcctttaggaggattagtaccacttttaaatatgatgctaaatgtagtatttggtggtaaaggcgtaggtctgatgaatatgttgatgtacgctataatagcagtattcttatgtggattaatggtaggaagaacaccagagtttttaactaagaaaatcgaaggaaaagaaatgaagcttattgctttacttattatattacatccacttttaatactaatgttctctggtctttcagtagcaataccagcagggcttgaaggaatttcaaatcctggattccatggattatcacaggtattgtatgagtttgcatcttcagcagccaataatggttcaggatttgaaggtctaggagataacactatgttttggaatataacaacaggtatagttatgttctttggaagatatgtgtctattatagtactactagcaatatcaagtttgttagcatctaaaaaagctgtaaatgaaagtataggaacacttagaacggataattttacatttacaatagttttagtacttgttgttttaattgttggtgctttaacatttttcccagccttagcgcttggacctatttcggagcatctagtgttgtggcactaaaaaattgggagggagtaaagttttatggaaactaaaaaaacaaagtttattacaaaagatattttcaaaacttccattatagaagcttttaaaaaattaaatcctaaatatatgatgaaaaatccagttatgtttgttgtagaaattggatttatagtaacattgatacttacaatagtacctagtttgtttggtgatgaaggcaataatttaagagcttataatgggattgtaacaataatcttatttataacagtcctttttgcaaattttgctgaagctgtagctgagggaagaggtaaagctcaagcagatacacttaagaaaactagaaaagatacagtagcaagggttatagatacgttaggaaatgaaaaaatgataagtgcaagtgagctaaaacttggtgatattgttttagtaaatgttggagaagttatcccaaatgatggagaagttatagagggcatagcttctgtggatgagtcagcaataactggagaatctgcacctgtcatgagagaatcaggtggagatttcgcatctgttacaggtggtactacagttgtaagtgactggttaaagataagaataacaacaaaaccaggagaatcgttcttagataaaatgatagctcttgtagaaggtgcttcaagacaaaaaacgccaaatgagattgctttaaatactttgttagtagggttaacacttatatttatggttgttttaatatctctttatccaatggcaaactatgcaggtgtaaagattccaatttctactatgatagctcttttggtatgtttaataccaactactataggtggattgttgtcagctattggtattgcaggtatggatagagtaactagatttaatgtaattgcaatgtcaggaaaagcagtagaagcttgtggagacgttgatactatgattttggataagacaggtacgattacttatgggaatagacttgcatcagaatttatagcagttggaaatgcagattcaaaagatttaataaattattctgttatgtgttcattaaaagatgatacaccagaaggaaaatctatagttgatttaggtatgaaattaggttcaacaggtaagacaaaagaggcagaggaagctgagtttgtagaattttctgcacaaactagaatgagtggtattaacttagctgatggtagagctataagaaaaggtgcttatgatagcataataaaaagagtaaaagaatctggtggtacagtgccagaagatttagaagaaaatgtaaatcgagtagctaaactaggaggaacacctttagtagtgtgtgtagataatgagatatatggaattatctacttaaaagatacagtaaaatcagggcttgtagaaagatttgctagacttcgagagataggaataaagacaataatgtgtacaggggataatcccttgacagcagctacaattgcaagagaagctggagtagatggatttattgcagaatgtaaaccagaagataaaatagatgctataaaaaaagaacaattagagggtaaaatagttgcaatgacaggtgatggaacaaatgatgctcctgcacttgctcaggcagatgtaggtcttgcaatgaatagtggtacaacatctgcaaaagaagcagcaaatatggtggatttagattcagacccaactaagatattggaagttgttgaaataggaaaacagcttttaataactcgtggggctttgacaacatttagtatagcaaatgatgttgcaaaatattttgcgattataccggctatatttactcttgcaatacctcaaatggagatattaaatgtaatgaaactttctacatcatttagtgcgatattatcagctttaatatttaatgctataattatcccatgtttaatacctcttgcaatgaagggagtaaaatatagacctatgaaatcacaagctatgttaatgagaaatatgcttatatttggtcttggtggagttatagtaccatttttaggaataaaattaattgatttattgattacacctttagtaatgattcttaatttaggttaataaatggaggatataaaaatgaaaacattaaagccagcattacttgtaagtattgtattgttagttgtttgtggacttgtatatccacttgttttgacaggtgtaagccaagttgcatttaaagataaagccaatggaagtatgatagaagtaaatggtgtaaaagtaggttcagaacttattggtcaaagctttacagatgcgagattctttaagggaagagtatcatcagtaaactataatacttatacaaaagaagatttagtaccagataaagatggaaatgcatcttatggaggtgtatcatcagggtcttttaattatggagctacaaatccagaacttcatgatagagtacaaaaagatatagaaaagtttttaaaggataatccaactgtcaaaagagaggatataccaacagatttacttacagcatcaggttcaggacttgaccctaatataagtccagcctctgcaaaaattcagataccagctatagcaaaagcgtctggaatatcagaaagtaaattacaaaaaattgtagatgataatacttccaaaaaactttttggagttttaggtgaagatagagttaatgtactaaaggttaatatagaggtcgcaaaaatattaggtcttatatagtattttgtggaattttagtaacaaaatattactcaagatttaatttaaaggttaaattttaaagagtgaaaatcaataatgattttcacttttttatttgaatattactaatatttggaataaagtgattgtaagtataaaatccaaaaaaaggttgcattatcaaaatgataatactataatatatttatcgttatcaatttgataatagatttggacatataggaggaaatagtatgttatataataacgcattagagttgataggaaacacacctgtagtaaggctgaataatttaggctgtactaatgggtgttctaacatatatgtaaaattagaaaaagtaaatccagcaggaagtataaaagatagagctgtttatgaaatgttagagggcttagagcaaagaggagaattaaaaaagggagatgtactagttgaagcaactagtggaaatactggtattgcattatctatgataggaaaattaaaaggatatgaagtagtaatcgtaatgcccgaaacaatgagcgttgagagaagagatttaatgaaggcttatggagcaaatttggtgcttacagatggtaaagctggaatggcaggttccatagaaaaagcaaatgaacttttaaaagaaaatccaaactataaaagcttaaaacaatttgaaaataaagataatccaaatgcacattataaaacaacagcagttgaaattatgaatgatgtcaaagatttagatatattcgtatgtggagttggaacaggtggtactttaataggaactgcaagatatttaaaagaacaaaatccaaacataagagtaattgcacttgaaccaaaaaaatctccagctatatcagaaaacaagactggacctcataaaatacaaggaataggtgctaactttgttcctgaaaattatgattctagtgtagttgatgaagtaatattagtagatgatgaagatgcatttgatacagttaaattacttgcagcaaaagagggaattttagtagggatatcttctggagcaaatatatttggtgctatagagatggcaaaaaagtatccagataaaaagatagttacagtagctccagatggagttgataagtatatgtctatgggaatattttaataattttatttgagggagtgaatactttgtttaagaaaataaataaagatattgaatatataatgaagaatgatccagcagctaggtctaagatagaagtttttttactttatccatcagttcatgcaatgataatgcataggatggctcatgctctttataagaagaagaagctttttacagcaagattaatatcccagatatccagatttatgactggcatagaaattcatcctggtgctaaaatgggggaaggtatattgatagaccatggaatgggtgttgtaattggagagacagctgaagtaggtaatagggtgacaatatatcaaggagctactttaggagctacaggaaaagatactggaaagagacatccaactgttggtgatgatgtattaattggtgctggaacaaaaatactaggacctttaaatataggttcaaattcaaaaattggtgcaaattctgttgtcgttaaggatgtacctaatggtgcaacagttgttggtataccagcaaaaatagtaaaaataagaaacctagaacctgtaaaaaagaataaaaaagaagtgtcctatgagtatgatgaattagataatgtatattatatataggatttatataactataaaataaactttataaaaattattttaaaaggtatttttttcaaatttgaggacataataaaaaagaactgaatgttacagttttggttcatcaatctttgataaacaagattttaaatttgtagcgtctaggaggattttattatgaaagcaaatgttaatcaagatacttgtataggttgtggattatgtccatcaatatgtccagaagtatttgatatgaaggatgatgggaaatcacatgttatagttgatgaagtaccaagtgatgctgaagaatcagcagcagaagctagagaaagctgtccagttgatgcaatagatgtgcattaataaaataaatgcctataaaaattgaattttcaatttttataggcatttgtcttttattcagttagtatttcaacccctgtttctgtaactaaaaccatacattcccattgagcagataatttaccatcttttgtataaatagtccaattattttcttcatcaacaaaaatttcgtgagttccttcatttaccataggttctattgtgaatatcatcccaggaaccaatagcatctcagtcccttttttagatacataacttacaaaagggtcttcatgaaagcttaatccaactccatgaccacctatttctctaacaacagagtatccatttttctttgcataagagttgatagcatcacctatatctcctaaaaatccccatggtttggcaacttcaagacctttttggacacattcctttgtaacttgaactaatttttttgcattttcattaacattacctatcataaacattcttgaagcatctgaatagtatccattaaaaatagtagaaacatctacatttataatatctccatcttttaagataatgtccttgcttggaataccatgacaaacttcattatttactgatgtacatacacttttaggaaatccattatagtctagtggagcagggatagctccattttgtagtgtaaagtcatgaaccaacttattcatatcttctgtagacattccaatttcgattttatctgaaatataatccaaaatttttgtgtttattacagcacttttttttatttcctcaatttgactttcattttttataatatcatgagttggtacaatatgacctaacttagcaaatgaatctattttattatccatatccatatgacattttttatattttttagtacttccacaccaacagctatcatttctatttaacttcataacttttcatccttcttttattatttatttaaattatgggttacataaactattttaaaacataaccattataaatattataacataaatactaagaaatcctttatagatagtgatttattcaaagtataaattattatatggttattgttgatgaaaagaggatagttaaatgtattattggatattagcgcacttaatagtttagttcaagtttttcaagaaaatcatatgttagaggacaattttcctttaaagtattttttgaatcttcatcaagataataatgcacaaatgattctgcaaaaaattcttctataaacttgcttatatatgcatgtgcaacttgtttagggtcataaagcttatatctttcctgagcaaatacttccataaattcttcagaatttgattttttatttaaaacatttttatctatagcatgtgcagtttcatgtaattctaaattttttgatgaatgtacatttgcatagctagggttactataacctattttagctactatagaattatttctatatataccaggtacatctttccaagtcttgcctgatcttacccaacatggaggtaattgatattttaaatcactaaattctggttcatcagttagatttgaatttattaattttatttttatatccttttctttaagtgtctgtaaatatttaatatttatttttgcaagtctgcttttcatattttcaacttcatctttatcataattcaagtcatcaggaagtataagcatttgttcaattatatctatgctactgtcttttatatcttcagattcttcatcaaatttatattgaagagtattattttcatagatagttatatttgtattattttccatataataagagtgaatatcctctaagtctaaaatattcatttgttgtaaaatatgttttgtttcgccactccatactactaaagaaagtgaattaaaattaattagtggattttcctttgcttttatatcattgcttatatctacatcaaatacatattcaattgagtcttctatgttaagactatctgtattctttttaatatataaatatgcttgttttaagtctatataaatctcatctaaagattcatcataaaattctgataaattattagtaaagagttcttcacttaaaagttcatttttatcagttatactttcaattaaaatattaatttcttttatcatatcgtaaatacttatttttctatttgctttttcactagatacattgcatggcgcaagagcaatgcaataaaaatctttttcttttttataaaaggctttaagtgattttgataaaagtgtaaagtctacacctatctgtaagttgaccttaagtgagtcattttgtaataattcagtattattttttttagctatatttaaattgttttccataatcattgccccctttttattagggtatcataatttttttatatgtgtcaatttgtttttttgaaaattataatttttttgaaaattttattttttataatttgtgaattttttattatagaaataaatatgttattattatgtcaaaatttagcattagattcatgtagagtatgttttatacatatattataattaattctttgaagattgcatattcaaaatacacaccattttttttaattctataatataatatttatatatttaatgttaggatgtgatttaaggtgtattttacatatattataagatgtaaagatgattctctatacactggatataccagtaatatagttagaagaatgaatgaacataagttaggaattaattcaaaatacacaagagcaaagggatttgaaaaactagaagtttattttgtgaccaacacaaaaagcaatgctatgaagttagaatactatataaaaaaattaactagaaataaaaaattgtctataataaaaaacccaagtatacttataaatttaattgataataaagaagattatattattggtaaggaaatagaacaattaacataaatatttatagtaacattataatgggtgcatatagtgtaaaaacttgacaataaatactattgtaatataatgaagttataaatatagtaaattaaaatagctaggggagccaagagctgagaggtataccgacccttacacctgatctggataataccagcgtaggaaagcttagtaaaaattcaagtatgtattatttgtgatatatgctatttctaagctatacctattgtaggtatagcttttttaattaagttatttaaattaaactttaggaggcaacaatgagtaattataaaataccaacacttacaatagctggctctgattcatctggaggagctgggattcaggctgatttgaaaacgtttagtgcaattggtacttatggtatgagtgtaataacagctataacagcacagaatactaaaggagtttttgctgtagaggatttaaataagaaaataataaaaaaacaaatagaggcagtctttgaagatatacctccaagagctgtaaaaataggaatggtttcaagtcctgagattatacttgaaatagttgagaatctaaagaaatacaatccaaaatatttggttgtggacccagtaatgatatctaaaagtggatattatctattaaagccagaggcaaaagaaaacttaattaagtatttgataccacttgcatacataattacaccaaatataccagaggcagaagaaataacaggaataaaaatacataatgtagatgatatgaagagagtaggagaagaaatactacaacttggacctaaatttgtacttatgaaaggaggtcatttagatggagaagcagtggatattttagttggtaaaaatatatttaaagtttataaaagtgaaagaattgataaaaaaaatacacatggaacagggtgcacattatcttctgcaataacatcttatctagcattaggatatgaaataacagaagcagtaaatctaagtaaaatctatataacagaagcaataaaaagaagttttgatataggtcatggagtaggaccagtacatcatttttataaatttgagtaataaaaaaatattggaggtagaatatgtataatttaattaaagatgtaaaaaaattaaatccattggtaattcattatactaataatgtaactataaatgattgtgctaatgtgactttagctgtaggagcaagtcctcttatgagtttttcatatgaggaagtagaagaaatggtaagtgtagcaaattctgtagtaataaatataggaactatgaactcaaatatgttggatttatttctattagctggaaaagcagcaaataagtacaataaacctgttgttttggacccagttggagtatttgcaagcaaagcgagagcagaacttacaagtagacttttaaatgaagtcaaatttagtgttgttaaagggaatgtatcagaaataaagtttataggtggctttaatgtaaggggtaaaggtgtagattcatttgatgaagaagaagattctactgagataataagaaagattgctgaaaagcttgaatgtgtagttgtagcaactggaaaaatagatataataactaatggtaaaggtatatataaaataaacaatggaactgataaattaaaaggaattacaggaactggatgtatgactgctagtttgattgcaagttttatggctgttactgagaatatattagaagcagcaacaatgggtgttcttacaatgtctttaagtggggaattagctaatttaaataatccaccaataggtacatttaaagaaaatcttatgaatgctatttatcaaatggatatagatactttaagtaaaaattctaatattgaatttttaaattaataaagagtaagggagacttaaaatgattgataaagaatctttaaaaaaatgcttaaagttgtatttggtaactgactctgaaatgcttaaaggtagagacttttataaatgtcttgaagatgcaatatcttctggaataacaactgtacaacttagagaaaaaaatgcttctggaagagagtttttaagaaaagctatgaaacttagagaaataactgaaagatatggtgttaagtttataataaatgatagagtggatatagcacttatttgtgatgcagatggagtacatgtaggacagagtgacattgatgtgagagaggttagaaagcttataggaaacaataaaattctaggagtatcagcaagaactttagaagaagctacttgtgcaaaaaatgatggcgcagactatttaggtgtagggtctatattcacaacatctactaaattagatgcaaaatcagcttcgtttgaaactgttaaagaaattaaagaaaaagtagacatgccatttgtgctaattggaggtataaatttagacaatatagataaacttaaatgtttagaaagtgacgggtatgctataatatcagctatattaaaagctgaagatatctctaaagaagtggaaaagtggacattaaaaatataaaattggctctggtagtgaaaaaaatggaaaaatttgatataatctaagagtaaaatttaagcaattataaatgataaacttttctacatatactttttaatcaagatatatgtagatttggttaaaaaggagctataaatgattaagatattgttagtgtgtgttggaggcatgtcttctaccctattggtaaataaaatggagaaggatgcaaaaaaaagaaatatagactgtaaaatatgggcagttggagaaggagatataaaatcggagcttgataactttgatattttacttcttggaccacaacttagatttatgcttgatgacgtaaagtctatagttggagatagagttccagtatctataatagatatggtaaactatggtacttgtaatggtcatgctgtgttaaattcggttttagaaatattaaaataaataataaaagtggattctatataatagagtccatttttattatttgttattaataggcttaaaacttagcttaccatttctttttttaatctccacatagcaagtgaaaaacttgaacagcacaatattaaaaatagtaggataacaggcagtatatctccaataagaatagtctcaccaaatattaagctacgtaaagcgttaataacatgggtaaatggattgagcatcactgctacttttaatcctccagataaactttctatagggaaaagagctgaacttaaaaagaaaataggaagtacaattgcagtcataattgtttcataaactatttcatttggcaataataaacttatagaataagctagacttgataaaaagaaggctgtcataaatatcagtactatcataagtaggattccaccaatgccagattctatccttactgagaagaatatacttactatacacaaaatagttacttctatgaaggaaactaagatagcttctaataattgaccaaggacgattgaatacctactgataggtgcaattaagactctatagaaacttccactgttcttcattataaagtttataataccaccactactacaagaagaaaacacaaccagtacaatgatacctggtagtataaaagcagtataattattgatatttatattattcatagtttggtttgcaatagaactataaagcacaagccaaagaaaaggttgtaatatagtaactacaaatgagattggatttttaaaacgccacttcatactacgccataagatatttaacattcccattcctcctttaagctttttttagaacttgtaagtgctaaaaatacatcttcgagacttggctctacaatttctattgcatcaaattctatatcatgttctaaaagccatttatttattaaagtaaaagcagttctactatcgtttacacttataaaaattgaattttctcgtacgctcataaactttactaaaccagtacttttaattgaatctttatatttttttatatcttcagtattatggaaagttatacgtagtatattttgtctaatgtaactacgtaaacttgatggtgttccttgtgctaaatcctttccattcttcataatacaaatattatcactcaattgttcagcttcttcaagataatgagtagttagaaatatagttgtgccgtactcatctctaatttttaataacatatcccacatagattttcttgaatcgacatccataccaacagttggttcatctaaaaataggattttaggagatgataccatattcatagctatgtccaatctacgttttacaccccctgaatatgatgaagtaggatattttaagtaactagataagtcaaacttatcaattaaagagtctattctttgttttgcaatctgtggttctactttatacattttactttgaaataccatattttccataagggataaatgttcatcaatagagatttgctgtgctacacaagcaatttgagtacgtatccaagaaggattatctactaaatcttttccaaacatttttacatttccagatgtaggtttgtaaaaggtagtcaaaatatttataagagaagatttaccagcaccattaggaccaagtaaagaaaaaatttctccagcatttacattaaagcttagaccatttaaagctttcacaccatttttatattcttttactaaattgtctatttcaatcgctaacatatattattcctcctctttaagtggaaatattatctctgtaatatagttatctgggtttccttttatcaacatacctggtcctttaataaatacttctctccaaggagtttgtatttttatattattttcatgaatatatttaaatatcatttcatacgtttttggcaaattactataagagcctgtgtgagtaaaaaataaagcttttgttttaggaaattcttttgtagttatacccatacgatttggagtttcagcagttggaacacataattccatttctgcaacaccagttttttggtcaacatcatagtagcaaaagaatggtgcaccgttagactttccttttatagctttaaatacatttggaaaatactttgttgcctcagtcataggtccattataacgcatggtagccactgtgactgattcgatatttttgatttcaattttgcaattcatttgtttacctcctaatgtgtgttcatattcttactagatttttaagcattaatacatataagattttgattagttgaaaacatataatcttatctcgtttgcttgttttcaagtctaacataacataaaatatatatcctctcatttgatgctccattttgtaaagctattatttaagctttactttagattttttagcaaattgaaataaagcaatttataaaataagtatttacaaattaagtgtattaatcgtataatacacttaataggatactagataaagtctgaaataaaggcgtatttttttaaagtaagtgtactatcgtattaatacactagaataggaggaatcatgaattttgaattagataatacaactcccatttatttgcaaatagtaaagtatataaagagacaaatagtaacaggagagttgaaaccaggagagacaataccatcaagaagagaaatggcacttaatctaaaagtaaacttaaatacagttcaaagagcatataaggagatgggtgatatgaatataataaatacttttaaaaattatcaaagcagtgtaacagttgatgaaaatatattaaaaaatttaaaattagagcttataaatgaatcactatctgtttttatagaagatatgaaagcaataaatgttagcaaagaagaagttttaaaaataatagaagataagtattagttttttaacaaatagaaaacttagtttagaaagtttatttataagcatattggatgtggaggatagtaaatatgatagaaataaagaatgtcagcaaaacatataaaaggatgcaagggcttaaaataagaaagatagaagctttaaaaaatgtaagttttaatatagaaaagggaaaaataactgcattacttggtataaatggtgttggtaaatcaactatgttaaaagcaatagcaggacttataaacattgatagtggagaaattcgtatagatggagaaaaaataaatgaaaaggtatacaataaattggcttttgttccagatgtacaatctcactttagcaatacaacaataaaagaaacatttgaatttatggaaattttttattcaaagtggaataaagaaaaatcaaaagaaatgatggacatatttaaattggatgaagatgaaataattgataacttgtcaaaaggaaacattgcaagagtaaaattaatacttggattttgccaagacccagagtacatacttcttgatgaaccatttacaggaattgatttgtttaagagggaagagtttataggagtaatagcgcaatatatggaggaaaatcaagccattatcataactactcatgagatagtagagatagaaagtttagttgatgaggttgtaattcttgatgaagggcagattataacttcatttaatgcagaagaattaagagaaagagaaggtaaatctatattagataagatgagggaggtatataagaatgaataaacttctatatctaataaatgtagatttgagaagaagcaataagttttatatagcttatatatcatttttttcattaattacacttagtttaaatttattcgaaattaataaatttaaaaattctaaatttattatgaacttagcaatagaagattttggaggtatattttatggactagggatacttagtaatcttggttttatccaaaatatattgttctttggaatgttgggactttttatatactatatttttatgtggaaaagagagttcttttcaaataatcaaagtatttatacacttatgatgttacctcaaaataagtttaagatttgtatatctaaatcaatagttttgataacaatgatatatggttttttgataagtcagacagcaacattatttatatgtaaatatatatttaatttcatttttagaaatattcctataatcaatatgaactttgccaaagatttatattatttaaacttgaagagtataccaattgattttatctcttttatggctatttatgtatttttactacttatagctatttctattgtaaattgctgtatattatttatcttttcctatataaataaattttatgtaattttaatcactttgctgattatagcaggcttatatttttcaacaatatatataaatataatcaatttatttagaaaatattataatcttataggatttcaatttaacaatttagtagcagggttattaagttttttaattataatgtttattctaaatggaatatcttatttgctaattaaaaagaaagtatctctttaaggaggggtggtatgaaattaaaatctaaaatatctatacttattatatttttgactttagcaatatattttagtataggtttattaaataatgaagataatttaaagataaaaactataaaaggtgactctaatgaattagaccatataaacataaattttggatatgctttgaatggatatataaattcatattatacaataaatggaagtaacaaaactaaaaagactgaattaataaaactacaaaaggatagtaagaacacaaataatttaattgatgtatctagtggttcagatttaattgctcatgttggatttgaaatgaatgaggagtcaaaagatataaactttgtgatagatgagaaaaaagaagatttagaaaaaggtgtatttccatcagaaggtagtgataaagaaattgaatatgaaaaattagatatgaataattttacaaggacaagatataaagtagataaaagtacagatgattattatgcaaatatactagcatcaaaaagatataaaaaatacttatatgtatctgtactttatgctacaagtgattcatcagaaaataacaaagaatattcaagtactatagatataataaaaattaatccagaaaataaaaaaatcaagactataaaaagtataaatttaagtaattatttttccgagaaataccaagacatagagaacataggtgtaagttatgctagcaaatatgaggataagatgtatattttagtaaatgtactaaatacaaacataggtgataatagtaattctaaatttcatttacttgagtataatcttgaagaaaataaggaaagcataatggaattaaaaactgatagcaaaatggctttagcaaaagcaaagttagaagctaataaattatatatggtaatgtcgaatgattatgataatagttcaattacagagttaaatttacttacctataatatattagataaaagcttagatgaagataaatatgttttagataatagagaaaaaagaggaattagaagtattgaaattgattcaaataaaatcgttgcatatacatcaaggctaaactctatattatcttgggataataaatttatgctatatataataaataaaaattctaaggaaattgtatatgaaggagaattacaatttaacagttcaaatagtatgttagaatttgaaataaagtaggtgagttgatgaaagatttaataagattattcgaatttgaattaaaaagaaatataaagaattatatatttataataatttgttgttgttcttttgtaattttaaacatagtaaaaaatttaaatgactataattacataatagaaaatgcagttaaaagtgaacagttaacaaaaatcggaaatacgatagaaacggtaaatgttacaggtttctcaagctttagaaatataatgggttctacagaatcgtggtttatatttggtataattgcatgtatttgctatgctttttttatttggtatagagactttaatggtaggagtaaatctatatatacacttataatgctacctaaaaatagaatcaatatttatatatctaaattattaaatatattatttctagtgtatagctatacagtagtacttacaatatctttgtttattgcaagtaagttgttgcctagacatatgcttggtaatgtcacaaactatggttttgtacaagaaacaatatatgagttaaaaatgttacttccatatagctttgaaatactatttgtagagtatatatttttattgataggatttgtatctgtagtatttacatcaattcttataaataaatctatttataaagtaagcactttaataagttttctatttttagttttggaaattttagtgtttataatttctatagaatttattataccttatgaatacagtgatgtatttactgttctatattcaagtataaacatatttgtatgtagtcttatatctaataaacttttgaagcaaaagattgacttttaggagggatattatgaaagcaaaaaatataggaaaatatacaatatgttttataatagtatgttttttaatgattactatgaccttaatattgagttattttaataaggataaactatctgtaaaaactttaaaaggcaatgtaaaagatatagggagagtaagtgtagtatatacacctaatataagcaaattttcttatgaggaggtaattataagtaaaaatggagtaagaaataataaaaaccccaaatcaagaattagaaatgattatttaaatattgacaaaaaatacagtgattttgttaatgataaaggaaaagaacttatatataaagatgatttgaatataggagaagcgtatacctctgttaagtctgatttagtacaaggaatgaatgctttaaatgattgtataaaggtttcaaataaaaatttaaaaagtggggtagaagaaaattttgatattaatttaaataagtctgattttaaagaaaacagttggaaaaccttgtttaataaaatatataaaggcaatttatatatggtaattagtgaaactaatatttcaggttctaaggtcaataatatttgtatattaaagatagatataaaaaataagtcttataaattattaaatagatttaatttaggattacagaatggatatcaacaaaatatcaatgaaattaaattttctattggaagtaaattatacttagaaatagtaaataataaaagtaaaaatggagatattgaaggacatgatagttactctaaccttattatatatgatatagaagataacacttttaatataagtaataaatttatggataatctaaacaaagaaaagaatgcaaatccaaaggagattggcttattaagtaaaactaagctagattatatgataaaaaataataaattgaatcttatagttacggatatgagtaattccataatcaatcttgtttatgatattaattctaatgagattaaattagaagattatgagatacttgatttaaaagtagattataatgaagcatcatctggagttaggaaagttaagttactggatgataagatttattctatttcaggtatgaagaacagtatatcaggagaattaaaaggatttaaagggattgttgatgtagtcggaactaagccagtaaaatttcaagtatttgatatgaaacttaaaaagaatatttatgaagctgagctaataaatggagatataagtttacaagaaaagttattttttgttgcaaattaagtattagaattaattttagaactttaaacttttatatgtatcacagataagtataagtaagggagtgtctcaaaataaactttttagttcatgagacactttttttatatgaaatcaaatatattttcattgtttagatttattttgataatgaaaaaaagattatctttattttaagaaagacatttatttataattatatacaaaaatattttttaatgtttttgtgtataattataacaatttaatttatattaatgcacttaaatttgaaatagaatgcttatagtggtaaaattaattattagaatattagaaataataaataaataatacattgtacttaaaagggggagaaatttaagatgaacaaaaaatatattaaagcagggaatttaattgatggaacaggaaatagtattatgcaaaataagggtataattattgatggagatactatagttgaaattgaagatataagagatgatttaaatggatatgatgtgtacgattacttagataaaactgttatgccaggcattatgaattgtcatgttcacttgacaatggagccagttggaaatccaaagatatattatgataatgtatcagatgtagagcttgtagtaaatacgataaaacaagttgatgcttatttggattcaggagtaacatatattagaagcttaggttgtcccaaatatgtggatgtacaacttaaaaatcttatagacaaagggtctatagatggtcctggtatagttacttcaggtccagttatatgtatgacaggagggcatggatattattttggtattgaaagtgatggagtggatgaatgtagaaaatcagccagaacagttttaaaaaatggagtagattgtgtaaagataatggcaactggaggtgtaacaactgatggagttgagccagggtcaccacaattaactttggaggaaatgaaggctgctgtagatgaagctataaaagcaggtaaaataactgccacacatgcacaaggaagaactggtataaaaaatgcagttcttgcaggaattacttctatagaacatggtgtttatttagatgatgaaataattgatttgatgcttgaaagaggaacttacttagttccaactgtggctgcaccatattttattctaaatgcaggaaaagaaagtggaataactgaagctactcttagaaagtgtgagattgttgccattccacataaagaatcattcctaaaagcatataaaaaaggaattaaaattgcagttggttctgatgcaggaacttcttataatgaacatggaaaaacatattatgaaatgaagctaatgtcagattatggtatggataatatggatataatagttgctgctacaaaaacagcatctgaacttttaagaattgataaaaattatggaactctagaaaaaggaaagaaagcagatgttatagttgtaaatggaaatccagtagagaatatagacgtacttgcagatgtgttagcagtatttaaacttggtaaaaaagttagataaatagtataaaaataaaaaagagtgtctaaagaaatttttaaataattatagacactcttttttattagtaataattaaatcttttatactttagaaaatagattctattttatatttagatataactctttaaaatcattcttatgcaatataatctatagaatctacacatacaaagtatattcttgaatcattagaatttccaagtactataacatcatttttcttacctagaacttcaacaccagttagaaccaaactaccagctactacagtaacttgattatttatatttgacatataaagattatctaggatacctttattacaacagcaatcatcacaatcgcagttacaattacattctttgtaatgttttttatcaagatagtaacctaaagatgctatgaaatcttcataatctgcaggtgtaatatcaaatgcaacagctttaagattacacaatgatgctaaatctacgtttgctaatggagtagatgcagcaagtataaaatcaattatagcagcaagtattgcatctaatatagccccaaggtctatcgtaggaggaataactgcatcaataagtgcaattaattcagctactcctggtatagttcctatagtattaattaatccctcaagagttaaagggactggaataggataagatactctaccagctatatctattaaatcacagttacaagcagaaaatctttcaaaagtaccatcaagtccagataaattatcttttggaggagctgaaagatctatacctaccaaattagcacctactataaagaaatctgagataaaagcaaattgattaaagtttacaaaaggtcttagagcatcatatcttagaagttctaaggcctctctcatactttttttacaacaacattgttttattttaggttctttatatttatttggataattatagtatctatcagctacttgataattttcatagtatctttcatttgtatttggataatcttcctcatattcttgtgtaaatctaaagtcctctctacatttattattttccactaaatacactccttttatattttaatttaaatgtatagataattaagcttatctatatagtaatattatatttataatgtaaaaaaatgttacaaaagatattataaacgaataaaaaataataatttgtcagataaacttgtaaatttttatgaataatccattctaaaacaaaaaactgtgtataaaaaaggtttatatgttatatttatataaatataacatatgaacgagaaaggagtggtttgataaatgattgaggtagataaattgtgtaagtcttttacaagggttgtaaaagatgataagaataaaagttcaataagaaagctaaagaaagtaaaaactaaaaaagaagaattttttgctgtaaataatgtttcatttaaagttatggaaggtgaaattgttggaatattaggtccaaatggtgcaggaaagactacattacttagaatgttaggtggcatattaacaccaacatcaggaagtataaatatttctggatatgattattcaatagatagaaattcagcaaaaaaagaaataggttatctctctggaaatacaaaactatatggaaggctttctccgagagaacttctaacaacttttgcaagtctatatgagatgtcaaaagaagatatagaagaatcaattgaaaatattgtaaaaataatggatatgagtgaatttatagataatagaattgaaaatctatcaactggtcagactcaaagaacatctatagcccgttgtttaatacattctccaaaagtatatatttttgatgagccaacactaggtctggatgttttaagtagtgcatctattatagattttatgaagaatgaaaaactaagaggaaaaactgttctttactcaactcattatatggaagaagcagaaactttatgtgacaagatttttatgattcacaatgggaaaataattgcatcaggaacaccacagagtttaaaagaggaatctggagtaaataatttgagagatgtattcataaaacttgccagaaaggaggacatttaaatgagaagtaagattgtaaaatacatatttaaaaaagaaatgttagacatattgagagataaaaagactttatttatgatgattgttgtgccacttcttttatatcctttacttatgttattaatgattcaagtaatgaatatgtctgcaagtagtatgaatagtaaggacattaatatagcttttaataataaacctaataaggtgttagtatccatgattgaagatgataatttagaaaaagatactaaaaatacttcaaatgataaaggcaaaataagagtgttagatgtagataactataaaaagtcattagaagaaaataaaattgatgcttatataaagatggaagaaaaaaaatcatctataaattatcaaatatatataaattcttctcaagaaaattcttctaatgcactaaaaagaattgaaactgttttggataaatataaaagatttaccatagaaaaaactttatctgaaaaaggattagatgtacaagctactttagaaccaataacatatagcactgtagatgttgcaaagacggaagaagtggcaggatactttttaggtcagatacttccatttatattaataataggagttttactaggttcaatatatccagcaatagatgttatggctggagaaaaggaaagaggtacattagaaacattatttacactcccaatatcaaacttagaactggttatgggaaaatatatggcagtttctcttagtgcaatagtaacagcaattttaaacattttatctatgggactgactatggcatttattttagttagtggaggtattagtagccaatttggctttggaaactttaattatggagacttagtcttaccaattataactactttaatttgcatatgtcttttttcaatggtagtttcagcaataagtatgtgtgtatgttcattagcaaaaagttttaaagatgctcaaaactacataacacctcttatgttaattattatgataccatcatatgtttctatgataccaaatatagtattggatagagtgacagctgtaatacctgtagtaaatatatctttacttataaaaagtgtattatcttttaaaagcgatttaaatttaatagccttagttttagcatcaaatgtagcctttgttatattggcaatcatactactgtctaagatgttcaattctgaggaaatactttttggtaatagtaagagtttttctttcttagagaaaagaagtaatataaaaaaagggtctataccaactgtaagtgatggtgttattttatatgcagtaggattagttctattgatttatgttggttctttagttcaaattaaatttggtatggcaggtattataatgacacaattcatgataatttctttaccattattatttgcatgctatattaaagctgattttaaagaggtatttagcttgacagttcctaaattaaagcatgtgtttgggagcattgttctttggattggtggatacatacttattatgattataacacagctaattttattcttatttcctcaaaatatggaagttgctgaaagtttaaataaggctctttttatcaaagatagtgttttactgaatttactagcaatagctttattaccagctatatgtgaagaactgttttttaggggatttatattttcttcatttagtaaatcaaaagataaaaataagtctatcaaactcgctataatatgtagtggggtactatttggtattatgcatatggattttattagaataattccaacatcaatattaggtattatatttgcatacagtgtgtataaatctggttcaatatttgtatcaatgttattgcattttttaaataatagtgtagcagttgtgttaaatcattatacaactggaaatataaccaacttatataaatttgttgaagttgatttttcgaacttaaatgtacttaaatttgccttaattcttctaataagtcttatattaattatgttaggattaagagttttagatagaaagtctttaagaaattaagtataaagttattatatagattaaaatattaataagcactaaagtatatggatatatcttgtatataaaaatactttagtgctattttatatattttaattatatgaattatttatcgtttcatttatgtaatgaaaatgttatataaatgaaacaataaataatttttattttagaaatttatatttaaataatcaagttgaaagtgagatactaaaaaaattaatttaggaattatttgatttattcatttataaaaattaattactgatttgtcgaaaccattgtaataagaaaaaaatgaaaaaataaagtgtgaatatgttgcaaatactgtattttaataaaaagtagtcatttcttgtaaaatggatagttttgaaaagaaaatattaaaattataatataaaaataaaatttttcagacaattcaaacaaaaataatcaccttttaataaataattatatgccaaaataatccaatttattttctattatacctatatgaaatatataaatcaatagttaagacaatgaatatgctacattctataattatagtagcagaaaattttacaaaattaaagtagatataaactatccattttacaagaaatggaaacttttgagatgtacttatttgctaataaaatagaggtgttttaatgggaggaaatttttatgaggaatttacaaaaaaaattgatgttttttttatttatttgtataattttacaaattacatacacaacaccagtctattctttatgcaaactctataaaaacaactccataaataactttgagtctattgtgtctaataatcagtttattagcaaatatgcaatacaaataatacttattatggctataatatgtatgatgcttatattctatataatatatgacaaattaaattttaaaattaaattgcaaaagatagcatatacagataatcttacaggagcaaatactatagataaatttgtaattgatgctaacaaaatactatgtaaaaatactcaagtaaagtatgctttattatatatagatattgataaatttaaatatataaatgatttatttggatatgaagttgggaatgaaattttgcgtaatttaacaaaaattattaagagtaatatatttgaagaggaaatgtttgcaagaatatctgcggataattttattataattatgaaatatatagaagaagaagatataacaaagaggttaaaaactatatttgaggaattagacttgtttaataataatcaagaagaaaagtataagttagttttaagttgtggaatctattttatacttccagaagatagagatatcaactcaatcatagatagggctaatatacctcataaaatggcaaagggaggacataaaagttcatatgcattttatgataataagattcatgaccaagagataaaagaaaaagagatggaaaatacaatgttttcaagtttagaaaataaagagtttattatatacttacaacctaagatagatcttaatacaggagagatacaaggttcagaagcacttgttaggtggaaacgtcctgataaagggctaatacctccaaatgaatttatcccattttttgaaagaaacggttttgttataaatttagatttatatgtgcttgaagaagtatgtatataccttagaaaatggattgatgcaggaataaatccagttactgtttcagttaatgtttcaagaatacatttatattgcaataattttatagaaacatacaaaaatataattgataaatacaatatacctgcaaagtatatagaacttgaattaacggagagtatcatatttgataattttgatattttaattgatataatgaataatttaaaaaaaataggatttttaatatctatggatgattttggttcagggtactcatcattaaatatgttaaaagaaattcctatggatatcttaaaacttgaccaaaaatttattatggaaacttataatagtaaaagaagcaaaataattgttactaaagtaatagaaatggcaaaagagttgggtatgaaagtcatatcagaaggagttgagacagaagaacagtttaaacttttaaaagaagtaaagtgtgatatggcacaaggatatttgtttggaaagccaatgccaattgaagaatttgaacatttaattgtatccaacttggtaagagggtaattaatctgtaatataaagaatttaataaattgtgttaaaaatggactctaatgtagtgttcattttttttgtgaaattttttatacttttactaaaaagtaattgacatatactttgtattattatattattgtattaataaattaatacaataatataataaggaggcatgaacatggaatgggaacttgataataacaaacctatatatatacaattagtagaacatttaaagttaaaaataatttcaggggaaattaaaataggatctaaattagaaacagtgagagcactagcagaagatgcggaagttaatccaaatacaatgcaaaaggctctaacagaacttgaaagacaaggtttagtttatagtcagagaactaaaggaagatttgtaacagatgataaggaaaaaataaaagctatgaaagaggaaatagctaatgtggagataaatacattaaaagtaaccttagaaaagcttggatatgatagagatgaaatgctaaaacttattacagaaaatctgaaaggagaattataaaatggataaaaatataagcaatgtttctcaagatggaatagttgaatttaaaggtgtaaacaagagttatggaactaagaatgttttaaaaaatattgatttaaatataccaaagggaaaaatagtcgggctgttagggcctaatggaagtggtaaaagtacaatgattaagctaatgaatggattattacagcctgataatggtgaaattatgataaatggaatgaaaccatccatagatactaaaaaaatagtttcatatttaccagaaagaacttatttaaatgattggatgaaggtatcagatttacttaagtttttctatgatttttatagtgattttgatgttagaagagcaaatgagatgattaaaagcttagatattgatgtaaatgaaaagctaaagacaatgtctaaaggaactaaagaaaaagttcaacttattttagtaatgtcaagaaatgcgagcatatatatattggatgaacctataggtggtgttgacccagctgcaaggtcatatatacttaagactatattaaaaaattattctgaagatagtactttactgattgctacccacttaataagtgaaatagaaaacatatgtgatgagataatattcatatcaaaaggagaaatagtgttacaaggagacgttgaagcaataagagaagaaaaaggaaaatctatagatgcattatttagggaggaatttaaatgttaggtaaattattaaaatatgagttaaaagcaagtggaagaatatttataccgttatatatagccatattgatagtagctgtatttaatggaatatttatgaatacaaatatacttcaggtacagggaataggaatactagtattaacaagtctttttatggcattaggagttttaactattgtagttacaattcaaaggtttagaaaaaatcttttgggggatgaaggttatttaatgtttactcttcctgttagcactagttcacttatattatctaaatgtataacagcacttatatacgctgtacttagttttatagttgcagtattcacttttggagttcttatgctttttggtacttctggaattttactacctgaaattttagatttgtttaacactagttttaaatggatttctgaaaactttttagatattttattattagtagtagtaatgtttatttcatattcatcatttattttgttattatatacatcaatctcaatgggacaattaccaaaattcaataaacatagaaacatagtggcatttgcttcttttatagctataaatatagtaatatcaattgttggagatgcagttggaagcatcttaccaaatgaagatacaaatatggtatatcatctttatcagagtcctagttttatgcttgcaatacttggtagtcttgtagttgcaatagcgttatttttcgctacaaaatttatattagataaaaaattaaatttagaataaatgtttttatatggagccatcttttgagtaatgttaaaagatggctcttattatttatgtagttaattcatgtatataatatgaatagtattttatttctagttaaatatatacatatgttgtataatgatattgcgtgtaaaaatttgtaagaataactatacactttatataagttatatcaagaaaatttaaaaatatatggatttgagggagaagatatgaaaagttatacaaaggctaagtggagtgtttggggtataattacattttcatttgttttagtattatttttaaggatgtcaactgctgttgtttcagacaatttagcaaatgagttaggttttaattctatacaaatttcaaatatagcatccttttgcctatatgcatatgcatttatgcaaatacctgcaggaattttgattgataaatatggagcaagaaaaattagcagtcttggaataataatggcaagtttagggtcaattttatttggtttgattcaaagtatagaattagcatatatttctcgtgtaattgtaggggcaggaacatcagtaatattactttgtattttaaaaattcaagggagatggtttaataagtcagaatttgcttctgcaacagctaaattttcatttgtaggaaatttaggtggagttcttgctacttttccacttgtgtttttgtctgaacttgttggttggagaaattcatttttattaatcggtataattggtgttgtaattggatgttttatatatattattgttagagatacaccaaaagagtatggattcaatgtagatactgaaccctatgaaaagtcagagaaggttaatattgttgatggtattaagtctgttataaagaacaaatcaacatggtataattcaatgataatgttctcttttgttggtcttacaagtgcatttataagcttgtggggagtaagatacataatggacgtttatggtgtgagtaagagtttttctgcgtttatagtatcattttttacatatggatttatatttggttcaataattatggattttgtatttgctaaaataaggtctagcaaatttaatataataaaatttggagcaatgatagatttgtttatatggattgtaattgtagttgtataccaggtaaaaccaccaattatagttttaccaatatcattctttattatgggatgtatagttatgtcacatctacaggtttttaatgatgccaagtataaaaataaagaaatttattctggactggcaactagtgttattaatacttttgaatttataggaagtggaattattaatttgattatagctatctctttacaagtaaattcatataatatagttgatggatataaaaaaggttttgtagtatttatagtactaagtattataactatagtatcatctcatataggggtaaaaaatgatgattgtaaggctatatagtgttttattaatagtttaatttagtattatattttgcatatatataacaaatagtttgcattttcctaagatgtataattggaatataaatcttgtttactatgtacaaatggtattgtattatattaaatagaaaataagaactttaaactataatattggttctaaaatataaggtaaggagttttttatggatacgacgaaaatagatgatataagcaagttagatttaaataatttagacattaataagatggatatgggaggtataatggaaagtctgctagaatgggctactacaagcggagtaaaacttataataggtatacttatactttctattggatttaaaataataaaaaaatttgtaaaccatgttatgttagtacttagtaaaagagatattgatttaactttaagaaggtttttgaagtctcttcttttgagtgtacttaaagttgccgttataatcattgttctggaatattggggaatgagtttgtccagttttgctgctgtgatagcatcagcaggggtagcaataggtttggctttacaaggtagtctatcaaattttgctggaggatttattatactattgattagaccttttaaagtaggagattacgtagaagcagcaggccatggaggaacggttgaacaaataggacttttttatacacaattggttactccagataataaacagatacttatacctaatggttctgtatcaaatgatagtctaataaactattcagcaaagaatactagacgagttgatttgacttttagtgtagggtatgaagatgatatactacatgttagaagagtacttaaagatattgttaataatcataaattaataataaatgagccagaaccatttataggagtagtagaacatggagataatgctgttaaatttgcaactagagtttggtgcaagacagaagattattggacaatttatcttgatttactagaagaggttaaagttaggtttgacgaagaaggaattacgattccatatcctaaaatggatttaacagtaaaagaattaaacaaaatttaattttttaatatagtgtttaaatttaagaatataatatagatatacttataaggtttgtaaaaaattaataagtactgttattttgtaagtaaaaatataaaagaatgggagtgtctcaaaatgaactttttagttcatgaggcactctttttgtacgaaataaaatatatttttattatttcaacaatgaaaaagatgcttgtttctattttgagacagtataatttttatgtaactttaattttagtaaatataaagttttaaaattgataaaataggaggaatttttaatataaaagggtaaataaagggtttagagggcataatatagaataaattaatatatttaaggaggatttttatgtgtaaaaaaacgtatttattagtggtaagtatacttatagcaggtttattaactgcatgtagtgggagcccaactaaggattcaggacaagcacaagataatacaaaaaaggaggcaaatgcttcaaataatgctttaaaagatgaaaaaaataatgaaaatttaatggaacaagattttaaagtgccatacacagatgcaataaacatatttaaagataaatacaaggatgctgatatagtagatttaagtcttgagagagatttaaataaatttgtttatactgtggaaggtgtagatgataataatgaatataagatgaaaattgatgctaatacaaaagatgtattagaagataaaacagaaaagttagattcagaagatttaaatggagttgctagaaaagaaaaattagatttaaatgacataattacacctcaacaagctatggaaattgcattaaaagaacaaaatggaatggttaaagaatggagtttagacaaagatttagatgttactttttataaaataagaatagataaagataaaaatgaatatgacataaaagtagattctaaaaagggaactgtattgaaggtagaaaaagaagattagaagatttaaactatctttaaaataatttcttttttgaataaattttgtttaaaatataacaagcagggtataaagagactaaataactattttaggaggagtacggtatgtcattgaaatcactaaaaataaaagaaaatttatattgggtaggttcacttgaccctgatttaagagtatttgacataattatgtatacaccttatggaactacttataattcatatgtattaaaaggaacagaaaaaacagttttgtttgagacagttaaagataagcattttgacaattatattgaaagattaaatgatttaaatatagattttgaaaaaatagactatattgttgtaagtcatactgaaccagaccatgcaggaagcgttgaaaagcttttggatttagctaaaaatgcaaaagtagtagcttcagaaacagcaattaaatatcttaaggaaatcgtaaacaaagactttgaatatgttgcagttacagatggagatacattatcaattggggacaaaactttagaatttttctctgtacctatgcttcattggccagatactatatacacatatataaaagaggataaaactcttgtaacatgtgattcatttggtagtcactatagtaatgataagatagtaaatacacttgatgaaaatgaagaaaaggattacttggatgctttaagatactattatgattgtataatgggtccatttaaaccatctatggtaactgctatagaaaagataaaagatttagatatagatactgtatgtccaggtcatggtccagtattaactgaaaatcctagaaaaattatagacctttattataactggagtgtaaaggaacaaataaagttagaaaaagaagttacaatttgttatgtttctgcacatggatatacaaagattatggcagaagctataaaagcatatattgaaaaaaatagcaactataaagtaaatttatttgatgtaatagagcataagcaagaagatattttggcaaaaatagcagtatcacaaggtgtattatttggaacaccaacaatattaggagatgcgttaaagcctatatgggatatattaatatcgttaaacccagttcttcatggtggaaaagttgcttcagtatttggttcatatggatggagtggagaaggtatagaaaatgctatggagagaataagtcagcttagaatgacagcagtaaaaccttttgctgttaactttaaaccatcaaatgaagagattgataaattacattcttatacaggtaaattcctagataagttaaattctacttttggaagtaaaaagaaaactaagaaatttaaatgtgtaatttgtaatgaagtttttgaaggtgatagtgctcctagtgtatgccctgtatgtggagctaaggaagaccaatttatagaagttgaagaagatgaagttacttttagaaaagatactgatgaatatttcgtaatagtaggaaatggagcagctggtttttatgcagcagatgctataagaaaaagaaataaaacttgtaagataactatgatttctaatgaagatgagttgacttactatagacctgcactttctgatggtataaatgaagaacttggttcagatttctacatggaagataaagattggtatgataaaaataatatagtagtaatattaggaacgaatgtagataaattagatgaagtgaataaaactattatagtgaatgatggagctattaaatttgataagcttgtaatagctacaggaagtagaaactttataccaccgattaagggccatgatttagaaaatgtgtttactcttagaaatataaaagatttatatagtgtaaaagaagcactagaaaaatctaagaaagttgtagtgattggtggcggtttattgggacttgaagctgcatgggaatttagactaaaaggattagaagtagtagtagttgaagccatggatagcatactatcaaaacaacttgataaagagggtagtaaaatattagaacaatgtgtaagagatacaggaatagatgtaagattgggtgtagcagttgatggtattgaaggtgatggaaaagctcaaaaagttgtatttaaagatggagatagtgttgactgtgatatggtagtattttcaattggtgtaagagcaaacactcaaatggttcaggatacatctgtaaaaattgatagaggtattgttgtagataagacattacagacaaatgttaaagatatatatgcttgtggagatgttgcacaagtgggaaatattagtttagcaatatggccatcttcagtagaaatgggaaaaatagcaggagcaaatgcaagtggagataatttgacatttgaaagtgaagtatatccagtttcattagatgcaatgaatgtaaaagtatttagtattggtaatatacaaaattttgataaagaaatttcatcaaaagatgaaggtcaaagaatatataaaaaattatttatgaaagatggttcattagttggagctatacttataaatgatttaagctgtactgttaaattgataagattaatatctgaaaaaggtgattttgaggatattatgaaggctgatatactataatttaaatacattaaaataaaaaggagttgtctcaaaattgatttttttctaatcaaattttaaattcaactccttttttgaatttttatataaaataacatggaaattttagtaatgtctgtggttacatacataggtttaattgttttttatatggattgtctctggtataataaattgaattgtgtttgactgatagatatttttattgaaagttaatacctgttatgcgataataaggacgtgttaggggagtttttataataacaattaatctcagtttttgtgttccaatagtagcatcaacacattctgatgtagtagttcttttcttataaaaattagttacaaatatgcttgtaattatttgatatgtaaatttaccaatattataaatgatgacctcgataataaggagagtgaaaaataatctatgaacgaaaatattttgattgtggatgatgaaaaagaaatagcagatttaattgaagtatatttaaaaaatgaaggttttacagtatacaagttttatacaggtaaggaagctctagaatgtattgaatctaaagatttggatatggctattttagatattatgcttcctgatattgatggatttcatatttgccagaaaattcgagaaaaatactattatcctatcattatgttaacagctaaaattgaagatatagacaagataatgggtttaaccataggtgctgatgattatataacaaagccatttaaccctttggaagttgttgcaagagtaaagacacaattaagaagatatatgcgatataataattcttatgaacaacagtcgataattgttaatgagtatgatattaaaggattgattatcaataaagaaacacataaatgtagtttatttgggaaagaagtagcattaacaccgattgaattttctattctttggtatttatgtgaacatcaaggaaaagtggttccttctgaagaattgtttgaagctgtatggggagaaaaatatcttgataataataacacagttatggctcatatagggcgattacgtgaaaaaattcatgaaccttctaaaaacccgaaatttataaaaactgtatggggagtaggttatacaattgaaaagtaaaaatattaaagtcaatcctgactttactcaagtgagaaataaaatttttatgagaacagctttaatggcatttatagccattattttcatatggattttatattcttttatattgtatggtaagttttctatctggatagtatcattctttgaaaatgcttttcgtatggaatataaagctgcattgaatttatatcagcagattttccgtaatagcatggagctcttcatgatactagctatggtgattgtgttttttataatattccgtgtttatttaaattggtttacaaaatattttagtgaaataaatcaaggtattgactctcttatcaaagaagatgttggagaagtggctttatctccagagttattggcaatagaaaagaaaataaactcaattaaacatatacttgaacaacgtaaatttgagacacaaatggcagaacaacgtaagaatgaacttattgtttatcttgcacatgatttaaaaacaccacttacatcagttatagggtatctgacactacttcgagatgaaagtcagatttctgaagaactgcgaaaaaaatatttatctatttcgttggataaggcagagcgtcttgaagatttaattaatgaattctttgaaattacaaggtttaatttatcaaatatatcacttgaatacagtacagtaagcttaactcgtatgcttgaacaactaacatatgagtttaaacctactttgatgagtaagaatttaaaatatacactgaatgttacaccaaatatgatgataaggtgtgatgttaataaaatgcaacgtgtatttgataacttattacgaaatgctgtttattatagttttgaagatactactattgaaataacagctgtacaggaggatgattatataaagcttaaatttataaatcatagcaatacgattccagaggaaaaacttgagcgtatttttgaacaattttacaggttggatacatctcgtaattcaaacagtggtagagctgggttgggacttgctatagctaaagaaatagtggagcttcataacgggacaataacagctcatagcgagaacaatataattacctttaaggttattattccgattgtaggaaatttgtaagaatttaagtataaaaaaataggaaattctttaggataaataaataaagagcactcttgttattgatataattactgtatcaaaacaagagtgcttttattttgatacagtaattatatcaatagaaaaatgtgaaaatatattatgtggaacagatgcaattgtaagtgaaggttgattggatttgaaatagaaaaagtattttaacatgtttctgtagattgtataaaaataaataaatcaacaaaggagaatcaaagatgaataataaaaaaattgcagttatatttggtggaaactcaacagaatatgatgtatcattacaatcagcttttgcagtacttgagaatttgaatacggaaaaatatgatattataccaattggaattacaagggagggtaattggtatcattatattggagattataataatatccagaataacacttggtttgaaagggatactgatataattccagttattgtttcgcagaaccgtgtcaaaaatggtattattgaatttttaattcctgatgctgtttctcagaatcatattccaaatagtgctattgaatcatgtgaaaatgatattaaatacactaaacttgattttgtatttcctgtattgcatggaaaaaatggagaagatggaacagtgcaggggttatttgaattggcaggtatacaggttattggatgtggtactctttcttcagcattatgtatggacaaagacaaatcacataaacttgttcattcagaaggtattaaagtaccaaaatcaatattactaaaatactcagataaatttaatgtggctgaactgtcaaaagacttaacttatccattatttataaaacctgtgcgtgcaggttcatcatttggtattagtaaaatttataaaaaagaagagttacaagtagcagtagacttggcttttgaacatgataatgaagtaataattgaggaaaatattgatggttttgaggtagggtgtgcagttttaggaaacgatgacttacttgttggaagagtagatgaaatagaattgtcaaaaggattttttgattatacagaaaaatatacattgaaaagttcaaaaattcatatgccagctagaattgatttggattgtgagaaaagaatacaagagacagcaaaaattatttatagaactcttggatgttctggatttgctagagtagatatgtttttaactccatctggtgaaattatttttaatgaagtcaatacaattcctggctttacttctcatagtcgttatccgaatatgatgaaaggtattggactgtcttttgaagaaatattggataagataattgaggtgtacataaaatgatgaataatattttattagataaaaataaagaagataaaatgacaaatactatcttattgactaaagataaagtttatgatgggaatctaattctagtaaatgcttttttaccagttaaaacatctgaagatatagatttaattcctgtagatacaaggtttccaagtattcttatgaaacgtgaagctacaaatattttacaaaatattttaaaaagtatatgtggaataaatgaaatagtacctgtaagtggatatcgtactgcagaggaacaacaagatatatattcaagctctctgcgtgacaatggaaaagactttactaaaaagtttgtagcacttccaaatcacagtgaacatcagacagggcttgctattgatttagggttgaagaaagaggttatagattttatctgccctgaatttccttataatggtatttgtaatgagttccgtaaggcagcactacattatggttttatagagcgttatcagtgtaaaaaagaagaaataacaggaatatctcaagaaccatggcattttcgttatgtcggatatccacattctgagattatcaataaaatgaatctcgcccttgaagaatatatagaatatattaagagattttcgtatacaaattgtttaaaaatagaagataaagaaaaaattatagaaatcttttatgtgcctattcatactaaagaagaagtgagaatctctatacctgaacaatgtgtatatcaaatatcgggtaacaataaggatggttttattgtgacattttggagaaatagaaaggactaagaaatggaggaacaagaatgattaggaataaatcttatgcagggcttgattattttaggattatagctgcattacttataattgcaattcatacatctccattattatcatatagtaaaatggctgactttgtgttaactagtataattgctcgtattgctgtgccattcttttttatgctatcaggcttttttctaatttcaacatataattataattgtaataaactgaaatcttttctaaaaaatgtattatttatttacgggatagctattgtaatttatattcccttaaatatttacactggatatttttccatgaataatttagtgcccaatattattaaggacattgtatttgatgggactttatatcatttatggtatctacctgcatcaattattggtgcaagtattgcatactttcttgtaaaaaaactaggtttaaagtactcattagtaatcactattgttatttatgtaattggtatgtttggtgatagttattatggttttttagaaaaaataccactattaaagaatttatatgggtatatttttgaagtatcagattatacacgaaatggtatattttttgcacctgtatttttcatacttggtggaataatatctaataaatctaattatatgtcaactaaaaatagcttgattggatttcttatatcattcttacttatgttatgtgagggaatgtttttacataaactaggggtacagcgtcatgatagcatgtatattatgttattgccatgtatgtatttcttatttacagccttaacatttttaaaaggttctcgagctaggttattgcgaacatcatcattaattatttatattatacatcctatgatgattgttgttattcgtatgttttctaaaatattcggaatacaaactgtcttggttgacaatagccttattcattatatagtggtaagtatagcatcttttatagcttctataattattatattgattcttaaacctctaaaaaaagacttgaaaggagaacataaggtaaataccaatagagcttggattgaaattgatttaaataatttggaacataatgtaaagatgatacaaaaagctatgccagaagattgtgaattgatggcagttgtaaaagctaatgcctatggtcatagtgcttttgaagtagcgacttgtgcaaaccaaataggtgtaaaagcatttgcagtagcaacaatagatgaggggattgatttacgtcgatatggaatactaggagaaatattgattcttggatatactaacccaataagggcaaaggaacttcataaatacaatcttacacagagtgttattgaccttaatcatgctatctctttaaacaaacagaaatacaacataaaatcacacattaaaattgatacaggtatgcacagactgggttttgatgttaatgatgtgaggtcaattttaaaggcatttaaattaaaatacttagatatatgtggcatatttacacacttgtgtgtttcagatagtctgaaagatgaagatgtagactttacaaataaacaaattgaatgtttttataagttaattgattttctgttaaaaaaaggtataaaaattcctaaagtacatattcaaagtagttatggtttttttaattatcccaatcttaagtgtaattatgtaagaattggaattgcattatacgggatattaagttctccaaatgatacgactaaattgcaacttgatttacgacctgttttatccttaaaatcacaagtaattcttattagaaaaatacaaaaagatgatagttttggatatggaagagtctttattgcaagcagagatagcgtaattgctatattatctattggctatgccgatggtatacctagaaatttatcctgtggaaaaagttacgtaataataaatggttgtagagcagcaatagtgggtcgaatttgcatggaccaacttgctgttgatattacagatatacctaatgtagaagttggtaatacggcaataataataggaagagataatttatctgaattatctgcttctgaagttgcaaataactcatgtagtatatcgaatgaattattgagcagagtaggaagaaggttaaatgttataaagaagtaactcaattaaatagtaatatttgttgtactgtgtaatttattttactctgactagacatttttagtaatattatgtctaatatatattttttataacttacatgacaatttaagttataaaaaggtgatgtttcagatttttattttgaaacatcaccttttttgttataatatataataaaataattataccttaactgtaaacttatatagattatttactttttaatattagattcattttttgagattggtatataataaacatatagagtatataataatagttaaagttaaaaaaggggaaaagcaatatgcagtatatacaagaattacttgatttgactcaaaattattgggtgttagccacaataatcggcttattaagtgcatttatagaaagctttataccagccttaccacttgttgctatagttacagcaaatgctgcaatacaaggattatttattggatgtttgttatcatggattggctcaggacttgggacaacttcattattcttattaataagcagatttaatgatagtaagctttttaataagttgagaaatagtaaaactgaaaaagcaataagttggatggataaacagggatttaagttattatttatagcgtatgcctgtccatttatgcctggttgtttagttactatcgcatcagcttttggtaaaaaagatttaaaagattttgtgccagcaatgttggcaggaaaatttgtaatgtttatagttataagttacgtggcaagtgatatagaaggttttataacaagtcctttaaagatagcatcatttatattattggtgtttttgtcatggaagattggaaatagagtaaataaaaatcttgaaaatcataattatgatttccatcataaaaaacatcacaatgataaagatgataaaatgatttagcttgtacgaaataaaacgtatcttaaaatgatttagtactaaattattttaagatacgttttattttttgtattaaggtacaaaatttttagttcttttgtaaactaaaatatataaaacttatttatacttagttcaaaatattgttatttattttttctacaactataataaaatataaaattgatatccaatcaaaaaaataactatgaaatttaatagcttagatatgaatttttctgtttttgagttagtttttataggtagtaaagaaatgtttatggtaatgggataaaacaattcaataccttctttagtaataaggtcaagacacaagtgagatagatatcctattataaacccactggacaaacatgagaaaactatattattgttagtgaagattgtcagagatttaaaaaaactataaataagtaataaggcaattagactgtgagtaaaccctctatgtctaaacctacttccaaataatttgtatattaacataaattttttacttatgtaagaacctctcatatctatatctggaaataaagaacctaaatatgcaaaataaatataaattataattaatactattttatatgcaatatcgtatttaactaggtacagattgtttataaaggggagtatcaaaagtgcgaatatataacctcccctttcatgtgtttcttttatcatataaaaatcctcctgaatcgtcactataaacattatattggtaaatttagactatcttttattatattatatagcaaacataagtttttttcaaaaggattttaatatttaattaatcttgagattttaaatttttgtaattttctaaagcaccattccaatttactacattaaaccagttgtcaatgtattcatttcttctattttgatattttaaatagtaagcatgctcccaaacatcaagtcctattataggagttaggtttttacttacagggctatcctgatttggagtagtcataatagataatttcccatctttagtagctacaagccaagcccaaccagaaccaaagacatctaaagcagatttttggaactcttgcttaaatttttcaaaagaaccaaagtctctatcaatagcttcttttaaagattcagaaggtatggttttttctggcgtcattatatcaaaaaagaatttatgattataagctccacctgcattatttcttacagttgtagcaatatctttaggtaaagaatctaaattttgcaataattcacataaagaataattataaagctcaggatatttttcaagagcagcatttaatttatcaacataagcttgataatgcttatcatgatgcagtttcattgtttctttatctatataaggttcaagtgcatcatatgcataaggtaatggtttaaccttaaatttgttattttcaggtgtaaaagcaaatgaagttatgcactgtgagattataaataaagacataataactggtattaatatttttttcttcataaaaatcacctcctaatatagtatttctagaaataaaaaaaatatgaaatattaacagataatttataagaatttaatagcaatttcattttaaattgaataagttttaaagccaaagacaaaactatgaaatatagaataagactaaaggacagaaaggaattttgattatatggacggcaatatttcaatttattataaaggtgatatatctaaaaaagaagatattaaatttaaaataaaagaatctgtaaataatacaagactttctagtagaatagagtataaggatgaggaaaaaacttttgattttgaaagatttaatgtaattgatgctatttatggaaataaaccatttgaaaaagatggaaaagttattgtttttaatggaaatatatataactatcatgaaataaaagaagaattaattaaaaaaggacacaattttactacaaatgatgatattgaagtcttattggcatcttatatagaatttggtaagaattgtgtacataagattaaaggaatgttcaactttataatctatgatagagaaaatgaaagtatatttggagcaagagatttatttgggataaaaccactttattatataaataaggaaaatgcaataattttttcctcagagtataagtttttacttgaatatatgaaaaatttaaatataaatgaaagaagcttacaaagttatttttcatttcaatatgtacttcctgaagatactatgatacaaggaataaggctgataccagcaggtcactattttagggtagaaaatggtatactatctttaaagagatataataaacttgagtttagaagtagtacaaaatttttttatactaaaaatcacttaggcaatagagatgtgaatgaggatgatataagaaatatagtagtagattcaatagtaactcatatggaagaggagaaagaaattggaacatttttgtctggtggaatagattcatctattataactactgtggcttcacaaattaatccaaatataaaatctttttctgcaggctttagtgtcaaaggatatagtgaattagaagtagcaaagaaaacagctgataagttaggtatagaaaatatccagattaatataacacaagatgaatatataaaatcattaccgaatgtaatttattctttggatgaccctatagcagacccttcagaagtaggtctttatttcttaattaaagaggcaggtaaacatgttaaagtagcattgtctggagaaggagcagatgaattatttggaggatataatatatataaagagtatagtactatgaaatcagttgtcaattcacctacttatattaaaagtatattaggaagagtttcagaacttatgccaaacataaaaggaagaaattatctttatagagctacaacaccattagaaaaaagatatataggaaatgcaaaagtttttgaaaacagcgaagtaaaaagattcttttttaagtataaggaaaagaatatatatgaatacctgttgtctaatttgtatagagatgcacaaaaaaataattacgattatataagtaaaatgcaacatatagatgtgaatacatggcttcaaggcgatatacttcaaaaaattagcaaactttctacagctgagcaggttgaacttagagtaccatttttatataaagatgtatttgatgtagcaaaaaatttaagaatggagcaaaaaataaataagaataatacaaaagttttacttagagaggcgtttagagaaatagtcccagaatatgttgttcaaaggaaaaaattaggatttccaactccaataagagtttggttaaaagattctctaggggatattgtaaaggaaactatttataattcaaatgtagatgaatttatagataaaaaatatgcaataaaacttttagatacgcatcttaaaggtcatagagataattcgagaaaaatatggactatatttacattttgtctatggcatcaattatttattgagcataaaaatgtcgagtattaatacttttttcaatattaatcagagggcaaaagcatgcaatgttttcaccctcttgattattatggaataggataagtagaattttgattgattagtttactatctcaataaaattattggcaaatattttgacaagattactttcaacagctaaatttaagttttgtccatcatcatatccagcggaaatcaatcctagtaagtttccaaacatatctaaaagagctcctcctgaactaccactagagattggagctgtaaattgtatcatttgaaccgtttcaaaatcacgaaaagctgagataattccatctgaaactgtattaaaaagacctaaagggcttccaattgcaactattttttgacctctcacaggttttttactgactttaacaggtattggtttgcattttctatcaacctttatcacagctaaatcataatctgaatggtattttataatttggtaagatgtataaactttatcatcattttcaaatctaactaaaaatgaatacccatcattgactacatgaagattcgtaagtatataaccttcattatttattactactccagaaccactcttaaacggtttattttcgttattgcacacaacaatcataacaacagaagctgataactttgcaaggtcttcataagaaagttctacttcctcatcttgtgcaatttttttagatgttagatttgtgttattaagtgtatttttagagttaggtttattcgtagtaggagaagtcttattggtattttcactgtaatttatatttgtaatatgcctttcaaaaggtatttctaatatatttggagttttcctagaaagttcaaatagagtagaaaattttgaacattcaggatataaatcaagaatatctttatttggatttatatataaaatatcacacccaagttgtgataaaaaatataagaaaaaaagttcttgccttttaatatttccaaagtatactatctttggtgaaatagtagtcttcaccttgttataaaataatttaggtagaaaatagtccatccaacacaaaagtttaactgcaaagtttttgatgatagaggatgtacaatttggcatacttgtggaaaataaatctaaagtatttttaaatgcaatctttttagtccaatttaaagtgtcattttctattttacatggaaagtcgatattatataaatcccaactgttaaacttagaactatcataaatattaaaaattttaagcatcttatctgtttgttctttgtcaaaatttatttttagattgtttaatctaatatagggaattgtaggattattaaaaaaataagtatctatatttttaactttttctatgtatttatcaattgaatcatcaacacctatatatcttgtaaagtggacttctttaatatatgaagaactcttatttttataggtagtatcagatataaattcaattagaggttcagttgacttttttattgaaatctttaatggtttaatagtacaaatcatattttttctcctataataagatgatataatctattataaaacaacttaaaacaatatagtacaataattttgtagtttcaaaataaaatatgtacttgtttatataaatgatatataattacatattaaacatagcttttatacatttaataaagtatgtaaaatctatgtaaaaagtaagaaatataaacatttttttaattatattttaaaaatatcaagcaagttttcttcacaaatgaataaaaaatgttataatatgattaaagaaaaagataaataattagcaagatttgtttagctaaaattaacaagggagcgataaattatgggtataacattatcaaaaggccaaaaggttgatttaactaaaggaaatccaggtcttaaaaatattttagtaggtttaggatgggatactaacaagtatgatggtggatttgactttgatttagatacagcagcatttttaacaggagcaagtggaagtgttactaatgatggagattttgtattttacaacaatttaaaacatacatctggagcagttgagcatctaggagataacagaactggcgaaggtgatggagatgatgaacaaatagttgttgatttatctaagattcctggagaaataagcaagatttcttttactgttacaattcatgatgcgacagaaagaagacaaaattttggacaagtaagtaattcttatataagaatagtagataaagacacaaatgaagagttaataaagtatgaattaggagaagattttagtatagaaacagctatagtagtagctgaaatatataagcacaatggagaatggaagtttaatgcactaggttctggttttgaaggtggtcttgctgcattatgtggaaactttggaataaacttataatttcaactataacaataaactaaagggggatattttccatggctatagtattaaaaaaaggacaaaaaatcgatttaactaagggaaatccaggtcttaaaaatataaaacttggactaggatgggatacaaattcatttgatagtggctatgattatgatttagatgtaagtgttttcatggttggagaatctcaaagagttgaaaaagatgaagattttatattctacaataacttaagacatccatctggagcagttgaacacttaggtgataatagaactggtgaaggtgatggagatgatgaggaaatattagtgaatttagagacaatgccaaagcatatacaaaagatagctgtaacagttacaatatatgaggctgctgaaagaagacaaaattttggacaagtaagcaactcatatataagagtattaaattctgaaaatgatgaagaaatattaagatatgacttaggtgaagaatttagtatagaaactgcaattacagtatgtgagatatataagtataatggagaatggaagtttagtgcagttggagcaggatttgaaggtggcttagaagcactttgtagaaactatggcttaaatgtttaatttaagcaatataatatattaaatataaataacctatacaaataatgtataggttatattatataaaattttgtggaggtttagtatgtcgattaatttatcaaaaggtgataaaatagatttaaaaaaatctaacccaggactgagtaacatacttgtaggtctaggatgggaccctgtgcaacaatctggaggaggtttttttaaatcgttatttggtggaggacaagctgatatagattgtgatgcatctgtatttatgcttaatcaagaaggtaaattaagtggaataaaagatttaatttattttggaaatctaaaaagtgcctgtaaatcagttttgcatacaggagacaatctaactggtgagggtacaggtgatgatgaacaaatcctagttaatttggataaagttccatcaaatattcataaattattgtttgtagtaaatatatacaattgtgtagatagaaaacaacactttggaatgatagaaaatgcctatataagagttgaagaccaaggtaataagaaagagatagcaaaatacaatctatctgataattattctgaaaaaactactcttatagtaggagctatatatagaaaagatggaagttggcaatttaaagcaattggtgaaggaacaaaagatgcgggtcttaaagaagtaatgcaaaatttagacaggattgagtgtgcatatggaatttaataatgatatcaaatattataatgtagataaagaagaagttacaaaagacttatctgttaatcctgaaaaaggtttatcagaatcagaagtcaagactagaagagaaaaatatggtttgaatgaatttactccaaaagaagagggtagtttttgggatgatttaaaagaaagtttaagtgaaccaatgatagttatcttgattattgcagcagtagtaagtgcagtaattggggaaactcatgatgcaatagggattgtaggtgctatagcaataggtatagcaataggtatgattacagaaggtcgttctaagaaagcagcagaggctctttctaagttgactgaaaacatagaagtaaaagtattgagagatggggaagtacatcaaatttctaagagtgaattggtaccaggtgatatagtatatattgaaactggtgacatggtacctgctgatggtagacttatagaaagtataaaccttaaaattagagaagatatgttaacaggagaatctgatgacgtatctaaaaagtgtgatgtagtagtttctatggaagagatagaatctaaaggagcagtagtagtacaggagccaatacctgcaaaacagataaatatggtgtttggtggtacacttgtagcttatggtagaggagctctagttgtaacttcaattggagataatagtgaaatgggtaaaattgctcaaaacttatcagaaacagatgagcaaactccacttcagataaaacttggaaatttaggtggtttgatagccaaagtttctagtgcagtagcaggattactatttatatttatggttttccaaatgataagtaagaatgtattaaatgtagatatgtctggaatattaccgtttttagaatcaatagacccagttaaaacagcatttacagtatgtgttgcgttgatagttgcagcagtgccagaaggtcttccaactatgataaatatgacacttgcaataacaatgcaaaaaatggctaaaataaatgcattggttaccaaaaaagaagcttgtgaaacgataggttctgtttctgtaatatgttcagataaaactggtacattaactgaaaatagaatgactgtagaagttgcatatgttgatggcagatatattgaaagttcagaagaggaaataaatagttattttgaagaaaactgtatgataaactctacagctgatgtagagcacaatgatggtgatattaagtatttaggaagtgctactgaatgtgcattgcttttatattacaaaaacgtagattatagacaagttagaaaaaattctaatatagtagctcaaaatccttttacttcagattcaaagagaatgacttctgttataggtcaagataatcatcatgtactattatcaaaaggagcaccagaagtcttacttgaattatgttcacatattcaaagaggaaaagacatagttccattaactgaaaatataaaacatgagattttagaagaaataaagaaattgcaaataaaatcaatgagaactttagggtttgcatataaagaaatctcacaagctgaagaagaagcagcagtaactgctgaaagtgatgctatgaatgtaagtgcaatggaaaataatttagtatttagtggttttgttggtataagagacccacttagaaaagatgttatagagtctgtaaatacagcaaataaagctggtgtttctgtaaaaatgcttacaggagataatataaatacggcaagagctataggtgaagagttaggcctattaaaaaataatatgagagtggttgaagcttcatatatagatactttagatgatgaagaattaaaacaagagatacaaagtatttcaatcgtggcaagaagtaaaccagatagtaaaatgagaatagtttcagctctgcaaaagagcggggatgttgttgcagtaacaggtgatggtataaatgatgctccagcactttcaaaagcagatgttggtatagcaatgggtatatctggtacagaggtatctaaaaacgcagcagacataattttaactgatgatagttttagtaccattgtaaaaggtattaaatggggtagaggaatttatgataacttccaaagattcgttcaattccaattaactgtaaatgtaattgcatttttagtggctataatatctcaagttatgggacaagagatgccatttactacaatacaattattatgggtaaacataattatggatggaccaccagcactagcattaggtttagagccagttagagaccatgtgttaaatagaaaacctgttgatagaaaagccaatataatttctaagtcaatggtgtatacaatagtattaaatgcattttatataacagcaatactaatgttacaatctacatttaatttcttaggagttgatgaagctcataagggaacagtaatgtttgcgttatttgcttttagcgcactgtttaatgcatttaactgtagagagtttaatgcagatagtatcttccctaattttacacataacaaattagcactacaaataatagtgttgacaggaattgcacaagtaatatttactcagctattccaagatttctttaactctgtagcaatggattttatgacatgggtaaaagttttatgtgtagcagcaagtgtaattgtggttaatgaagttgtaaaatgtataataagactggtaaaaccaaaaaagactgcttaaaacaaattttttagaagaaaacagactgactcaaaatatgaattttgggtcagttctgaataaacatttaaattgggaggatagttatgggtgactcaaaggtatttgaaaaaatattctccagccaatcagatagaggaaattacactccttcaaagggatatctaagttattttatttcgtatattggtttagaagatgaagttttgtacaatctcgagatatttaagacaaaacaaaatattgatagcaaaaaagatattgctttatttactgatgttatagcaaatcctagtgattttgatattataaattattttaaaagtggacttcaaaaatatagaactagcatggaagatgtagatataaatattttgggatttgaagagattgattataaaataaagcaagcaatggatagagtgttaaaagaagaggaaaaagaatttactaatgatagagttaaacaaaattttatagtgaaaataatggcatggataaaaatttatatcggtgctttagatataaataaaaatgaagctccaaaagtaatattttatggagatataaaaaaacatgaagtttatttactcttaatattatacttggcaggttttgatgttttatatcttaatccaaattcaaagagtaatatagatattttaaaatcagaaagatacaatatagagtttgaagaagccaacataatagaagaaaaaatttcttttgaagaaagggttattttaggggaaaaaatagataaaagttctgtaaaaaaagcttttactgttggggcagaagcatcaaagcgtataagtgaggaattgttaaatgatgcaggatttataaaaccttggcaactccaagatagaaaaataaaaaatctacttctaagttcaactgttgatgaaatatcaatatactggaatcaaccacttaaattaagaccaggatttaagtttaatgatgctattgtagaagctccaaattttctttctaagattaatggaatatataatgataagaatgaatatattaagtttttagatttattaagagattcggaaagttcaacatttattgaatttaatggagatgtagatagattttcaaaagcttttacgagagaagcttttagtttatcctttttattggattcaaaaggtgtaatagataaaaactctgttttaaataataaagattattccatatcaacactagcacttaatcaacaaattatgattttagagaaagtggaagagttgttagaaggaagtatgtttttgaatggtttaagtggagaagacaagataaaaggtctatttacagtacttcacatggataagaaatttgttcatatgatgaacaatttcgattactcacttataaacccaaaattgattatatacatgtacaagagtattgtatttgataaagaaatagtttttcttatgcttttacttagtaagattggatttgatattatcatattatgtccaggaggagaaaacaatatagagaatgttataaataaccaattgattgatatacacagattggataaaatggtatatgaccttaaattaaattcgcttgaaaatgatatacctttacttaaaaaaatttttggaaagaggagacgattttagatggggataaatataaatagtttttcaaaagataagaactctgtagaggttactgagaatttgcctacagcagttcaagaagaaaacttcgatataatggaatatacaaataataaaaaaaatgaactgagaaagtctaaggaagttgaggcattgacatcccttatagaagtagaaaatccagatacgattttacagtttggtaggaaagcatctgaaggagtagcaagagtttctgatagccttttaaatacaataaaattaaatagaaatgaagaaaattctaaaatgctggttcatttaactaaaataatggataagtttgatttagacgattttcaagaaactaaggaaccaaatttcgttcaaaaacttttcaaaaaagctaataatgccattgaaatgatgtttcaaaagtatgaaacattgggaggagaagttgagaaaattcaaattgagcttgagcaatacgaaagagatatagcactttctaataagcaaataggtgctatgttaaatgaaaactttgagttttataatgaacttcaaaaatatattgttgctggagaaatggcaatagaagaaatggataatgaaatactacctttctttaaacaaaaatcagagactagtggagaccaaatggatgttgtcaattatcaagaactattaaaagtttatgatatgttaaatcaaagagtctatgatttaagaatagcagaaaatatagctatccaaacaatacctatgcttagaggtatgcaacataataattatggtttaattagaaaaataaatagtgcatttgtcgtaactttaccagtatttaaacaatgtttatctcaagctatattacttaaaaagcaagaattacaagcaaaatctctaaaagcacttgatgacaaaactaatgaattattgcttagaaatgcacaaaatgtaagtactcaaagtgcacaaatagctagaatggctggaacaagttctgttcaaatagaaacattggaaaaaatgtacaatactatcaagtctggtatagatgaaactatgagaatagaagaaaacaatagagctttaattaaggataatacaaagagattggaagaattaaatacgactataatttataataagtagtattatattaagggctaatttgtataaagttggccctttctatgtatatgaggaggctagacattgaaatatttcgattatatctgcaaagatgatttggagagaatttttttgaaggagccagaagactttagtgctaagactgaaaaagatgtgttgaaatatgcactgggcgcttttttatacgttccagctactcaatataatatgatttataagagtattataggggatgttaagggagttagaccattagctatttgtttagaagatgctgttggagtaaatggagagttagaggctatagaaaatcttagattaattttaaaaaatattagcaatgaaagtataactaataaagatggaataccactaatttttgtaagaataaaagatgtggagcaactgttgagaattaaagagattataattaaaaatagtcattctataacaggaatattaattcctaaagcaaattcggagttgattgaaaattgtatagaagctttatattctatgaatcttcaagatatgtatgttattccaataatagagacaagagaatttatatataatgaaaaaaaagaacttagttttactaatttgtacaatgctattttaagacataagtcaagaatattaagcattagagtaggcataactgatatattagggatgtatggtataaggagagataaaaacttctctatatataataatttgatttgttcttcatttatattagatataatcacatatcttcaaagaccagagttagatatacctataagtggtggagtatcagaattttttgatatgacaaataaggatataagaaataagtatatagaagaaatattattggataaatatcatggattaattggaaagaccgtaattcatccaatgcaaattcaaattgtacaagcgctatctacagtatcatatgaagattttactgatgctttggatatactggatagtacagacagtaagtatggtgtgagcaagggtgtattaggagagagaatgaatgaaacaaatccacattttttatgggctaaaaaaacattgattctatctaaaatatatggtgtattaaataaaggagtagactatgaagaattgcttaaattttaattgtgagattgacattattgataatccattgaatttagaactaaatgattttttagacgtaggagtaagaaataatagcaaaagacgttttttgtttatctcaaagaaactcggtaaacatttagcatgtaagccaagtgagatggataatttgggaaaattaatggctacaatttataatgaaaaaaataaggaagaatcaaatggtactgttatagcttttgctgaaactggtacagctgttgggcatagtttttttgattacttatgtggagattatgaatttattcatactactagagagcagtttgacgagttagaaaatctggaatttttagaggaacattcccatgcaacagaccagaatttatactttggtatgcttaacaactttaaatttggagatgagataatattggttgatgatgagattaccacagccaatacatgcatgaatataattaggaaaattcaaagcatttatcctaaaaagaaatacactatatgctcaatactcaattgggtaagtgatgaaaatttaagtaaagttactcgtttagaaagagagctaaattgtaagatagattttgtatacttatttaaaggaaactttaaattttatatagatgaagatattatttcaaattacaacgataattatagtattactaaattagagactatttcaagtgataaagtaaatttagtagtaaatcatatttatgttgatttagaagattatattggaaataagaaatatgtaaaatatacaggaagatttggaattaatagaagagaacaatttagattaaaagaaatcgttaagagagaaagtaaaaaaataactatggccagtaaagaatctttaaaaaatgaaaaagaaaagattctatttttaggtactgaagaatttatgtatatacctatgctgtttgcaaaagaaaaagaaaatcaatatgatatatactatcattcaacaacaagaagtccaattattaatattgataagaagcattatcctattaaaagtaaatttatgctaaagagtttttataatatagatattcaaaattatatttacaatatagataaacataatttttctaagtgttatttatttgtagagctgaataaaagtgaaaattcttatctagaatttattgatataattaaaaaaacaagtataaaagaattaactatagtatgttgtagctaaagtgttttaacaggataaaatatatcacgattttaagataggagttgagtcatatgagagattttagcacgtattctaaagatgatgttatttttttattaaaagatatatcaaatttaattgaagaagaaggaaataaagaaagagaattaaaaatacaaaatggtagacattattcagaaatgataccaatagagtatgaagttagtgaagattatctgaatttatatcatgagaaactaagagaaaataaagataagcttgcattttctataggagttatgtgtgaaaaaataattaaaaaaaatggaaatgatgtagtactagtttcacttgctagagcaggaacacctattggtattttggcaaaaagatatataagaagcaagtataatgtaagtttacctcactatacaatctctataataagagataagggaatagatatgaatgcaattgaatatatagtaaagaatcatccgagctcaaaaattcaatttttagatggatggactggtaagggaactatatcaaaagaacttgaaaaagcatgtgatgaacttaatgttaaatttaaaaaacattttgactcaacacttgctgtattagctgaccctgctggatattcaggactttatggaattagagaagatttcttaataccaagtgcatgtttaaattcaaccgtttctggtttagtaagtagaactgtactaagagaggatttaattggtaaaaatgactttcatggagctaagttttatagacatttaaaagataaagatgaatctatgaactatatcgaaactatagaagaatgttttaaaaatcaatttaagaatatatctgatgaagttgaaaactgggaaagtgacattataacaagagatggatactttgatgttttaaatataaaagaaaagtataacataacagatattaactttatcaaaccaggtgtaggggaaacgacaagggttttacttagaagagttccgtataagattcttgttaaagacttaaatgataaatctttagaccatatattcatattagctaaggagaaaaatgttgaagttgaacaaatggatttaaaagcctataaatgttgtggaataataaaaaatatgaaagatatttaggaaatatattagacaggagaatattgaatgattgttttttcagatttagacaggagtatcatttactccaataaatttttaaatgctgatagtaaatatgctaatatagaaatttatagggaaaaagaaatatcttatatatctttagatactataaatttaataaagcaaatacaatattatggtatgtttatacctacaactactagaacagtggagcaatttaagcgtatagaatttaataaatatgggatttattttccttggagtataacttcaaatggaggagttatacttaaagataatgaaatattgaaatcatggagtgaaaaaatagataaactaaaacctgattatgagcccattgaaagtatgattcataaatttaaagactatttgaatgtagatggaataactaattttaaagttgcagaagatacatttttttatatagttgttgatttctcaagatttaatttggattcaatcaaagaatatacaaatatattggaatcaaaaaattggaagttttatgtgagtggcagaaaaatatattttataccaaaagaaatttcaaaagaaaatgctataaaatacttgactaaagaattaggaatagaatatttttatgcagttggagattctattatggactatggtatgcttaatatctcaaataaatcctatgtattgaagcatggtgatataaataaaaatgaaatagaaaattcatttatatcaagttctttcaaaggaatgagtggaactgaagagatattatctaacattttagacgagaactgcctacttaatatataatgactgatatataaataataaactagaaaaatctgaaataaattatagtaaagtttatcatactaatttatttcagatttttatcaatttatatttaagtaagaactcaatatgttaaaatgaaggtggagtcattgcccagactgagatacatacctcatcatcataattttcatacacatgtggtatagtactgttaaaataaaaactatctccttcctccaatagatattccttatttccaagtgttatcttcattttaccttttattatatagccacattcttctccttcgtgtgtcacaaattcactgtttttttgtgtatgaccatctagcgtaacaagtataaattctatttttttcccagataaattaggaacaagaagttcataaaattttgtagaatcattagttactattttttttcgattatttttctttactactatatcagagtcctctcttccaatctcttcaaaaaaataacctatatttatatcaagagcttttgatattttccacattgctacaatagatggaacaaccatattacgctcaatttgacttattaagcctgtacttaaatctgaattttttgctaaagtagagatacttatatttttagattttctaagagatctaattttgcttccgacatctatattcattagatacaaaccccctcagacatgattataacatataatttataaagattaataaaataaaaaaaagttttataatgcatgtattttttatgttatattgaattttctgaaaagatgcattataatagtattaatattcaatatattgaatattgataatgatattttaatttaatgaaatggaggtaattaagatgaagagttttgtaagtcctgataatatttgggtattatgggcagttgtaactggatgggcagcatttagtatttacttggaacaaaagtacaattgggcatcaaaagtgtcgggagcaataatagctcttgtaggagcaatgttattatcaaatctaaatattataccagtagagtctgttgtatatgaccaagtatggggatatgttgttcctttagccatagctttattgttatatcaatgtaatattaaaaagatatggaaagaaagtggaagattgctcattatatttcttgtaggttctgtaggaactgtacttggagctatgattggatttttagcattaaaaaatgtagtaccagatttaaatattgttgcagctatgatgacaggttcttatataggtggaaatgtaaactttgctgctatgtcaggggcgtttgatgcgccaggagaattagtatcagcaacagttgtagcagataatcttttaatggcattatatttctttgtcttaatagctataccatcaattggattttttagaaaacattttaaacatccacatgtagatgaaatggaaagtataggtataactgaaggagaaacagtagcagcaaattattggggaagaaaagaaatatctttaaaagatatagcaatagccattggtagcgcctttataattgtcgcagtatctgtagaactatcaacttggtttaaagctataataccattatcaaatccttttttagcaatgttaaatactttatttggaaatcaatatctaataataactactttgactatgttgtttgccacatttatgcctaatttctttggtgatataaaaggagcacaggaattgggtacatttttaatatatatattctttgttgtagtaggtgttcctgcttcaataacattaataattcaaaaatcaccattactacttttatactgcggaataatggtactaataaacatgctagttacatttatagttgcaaaaatatttaagtttagtttagaagaagctattcttgcatctaatgcaaatattggtggtcctacaacagcagcagctatggcaatatcaaaaggatggtctaagctagtagggccaatacttatagttggaacatttggatacatagttggtaattattttggtcttttagtaggaaatattttgatataattttacgtgaaaagaagttgttttttagaaagatttttatttaattggaggttgttatgattttcgatggacattcagatacttgggcagatgtaacaataagaaggcttaacggggaaaaagatgtatttagaagaatccatcttgataattttaaaagagcaaatatagaaggagctatttttgtaatatggatagacccaccatatgataaagagcctgaaaaaagagttaaacaaattataagctctataaaagatgaaattgaagatatgaaagatgttgtaaacatagtaaaaaaatattcagatatagataaaggtataagtgaaaacaaaataaatattttaattggtcttgaaggattaagccatattggaagaaatatagatttactagattatttttataaagaagttggtgcaagacatgcatcattaacttggaatgaacagaatgaacttgctacaggatgtttaggggatgaaaatcgtggtttaactgaaataggtaaaaaagcagtcaataaaatggaaaaattgggcatgatagtagatgtgtcacatttaaatgaaaaatcattttgggatttaatgtctgttgcaagtaagccagttatagcttctcattctaatgctaggagtttatgtgatgctaaaagaaatcttacagataatcaattaaaagaaatttcaaatacaggtggattagttggaataaatagttttagaggatttactaatagtaatcctaagaagcaagatttaatacatttggttgaccatatagactatatggtaaatcttataggtatagaacatgtatcttttggttttgattttagtgattacttagggaaagagactataggttcttttactggaaatgctagtgtgccaagtgtagatggtcttgaaagcacacatacagcacagaacatagtagtagagcttgaaaatagaggttataaaaagaaagatatagagttaatctctagtggtaatttttataggctctttaaagatatactaaaataatataataaagaacttaaatttataaaatagtatatttatacaataatatctacatatttaaattggcgttcataatttattaaattaaattttaatgttactagaagtttcaattctagtaacattttttatgttaaaaatagatatagatatatattgacaatgataattattattgataaactataaaagtgaaaatgataataattttcattttaattaataaaagatttttaaggagggagaatgaagaaaaggtatttagtcataggaataataattttgtcttatttttctttatttataggagctgaagatataaatataatgcatatatttgcaaaaaatcagcataagcttatgatatttatcatgagtagggtaccaagattaataagtatattgattgctggtgtaggaatgagcatagcaggtcttataatgcaacagataagtaagaataaatttgtatcacctacaacaggtgctacaatagatgcagctcaatttgggatagtaatatgtatgcttttagtaccaactgcctctatttttacaaagacaataatagcatttgtattttctcttgtagggacttttacgtttatgaaaataatagggaagttacaatttaaaaatataatctttgtaccattagtaggtataatgtttggaaatataataggttctatgacggattttatcgcgtataaatacgatttgagtcaaaatgttagttcttggatgcaaggtgacttttctatgatacttaaaggaaattatgagatattatatatcacaataccccttataatattagcatatatttatgcaaataaatttactgttgttggtatgggtatggattttgcgacaaacttaggtcttagttacaaaagaattgtcaatataggtctgataatagtagcacttgttacagtatgtgtagtcgttacagctggtaatatcccttttataggtctaatagttcccaatatcgtatccttgtatatgggtgataatataagagcaagcatatggtatactggtttacttggagcggtatttgtacttatatgtgatatttttggaagaattattatttatccatatgaaatatctataggacttacagttggagttataggaagtatactattcctttatttaatattaaggaggaatgtgaatgaagcttagtctcaatcaaaaaatttactttgtaagtatattactattcatatcaatagcactttttataatttatggaatagacatgaatcatttagaatatgcattatcacaaagaataccaaaaatatttgctatggtattaggtggaggatgtatagcatttactactgtagtgtttcaaacaattacaaacaatcaaatattaacaccaagtgtactaggtttagattcattgtatgtaatgattcaaactataatagtattcatatttggttcaagcagtagtctgattataaatgaaaattataattttattattaatgtagctatgatgattggagcttcattgttattatataagatgttatttgaaaaaaataaaaataatattttctttttaatcctagtaggtatgatatttggaaccttatttaaaagtgcaacaacatttattcaagtaatgatagacccgaatgaatttttagctttacaaactagtataatggcaagtttaaacaatataaacactaatgtattgttaatagcatttataataattattgccataataccttttatatatgatgaaataaagtatttagatgtattgtcgttaggtaaagaacaagcaattaatttaggtgtagattttgataaggcagttaaaaaaatgataatattaatagcaattttagtctcaatatcaacagcacttattggacctatgacatttttaggacttttacttgctaatataacaagagaaatttttaaaacatataagcatacatacttgatttcgggttctatgttgatagggatgattacattgataataggtcaattttttatacaacatgtatttaagtttgatacgactttaagtgtagtaataaattttataggaggaatttactttattcaattactattaaagggggcaaatagatgatagagataaaaaatatatttaaaagatataagaataaaaatgttgtagatgatgtctcttttagtatagaaaagggaaagataacatcttttataggaccaaatggagctggaaaaagtacagtactatcaatagttacaaggcttataggaggtgatggcggagaagtaataatagaaggaaaaagcttgactaattatagcaataaagaattagcaaaaaaaatagctattcttaaacaatctaacaatataactttaaagcttacaataagagaattagttggatttggaagatttccatatagtgaaggtaatctaactaaagaggatgaaaattatattgatgaagcaatagaatatatgaagttgactgatatacaacataagtatttagatgaattgagtggaggtcaaagacaaagagcttatatagcaatggtaatagctcaagatacagagtacatattacttgatgaaccactgaacaatttggatatgaaccattccgtacagatgatgaaggtacttagaagtctttgtgatgagttagataagactatagtattagtaatgcatgatataaattttgcatcatgttattcagataatatagttgcattaaaaaatggaaaagttgaaaaagtaggtcgtacagatgagatagtaaatgaaaaagttttagaagatatttatgagatgaattttaacattaagaatataaatggaaatcgaatctgtatttatttttaaaatattgtatatgaaaataagcttgctatatgattttttataaagtttttaaattaaaataaagattaataggagagaggaaaatattgatatgaataaaaaagcagcaatagtagcagcagtagctattataggattagtgacagtgtttgcattaggtggaagtaaaaagaatgaatcaaaaacatcagaaaattcaaataataccataaagataactcataacttgggagaaacagatgtaaaattaaatcctaaaaaagtagtagtatttgattattcggctttagatacaatggatgcattaggtgtagctgagaatttagtaggacttccaaaaacgagtttaccagcatctttagaaaaatataaggataagaagtatgcagatttaggaggtttaaaagaaccagatttagaaggtataaagtcggcaaatccagatttaattataataaatggaagacaagaagatttttatgaacaattgtcaaaaatagcaccaacaataagtacaagtaaagatgataagaagtacttagaatctgttaaaaataatatagacaaaatagcaaaaatatttggagtagaagaaaaagcaaatcaagaatttagtaaaattgaaaagaaaatagaaactttgaataaaaaagtaacagataaaaatttaaatgctttaactataatggtaaatgaaggtaatttaagtgtatttggtgaagaatcaagatttagtatattatacaatagttttggatttgaaaataaagataaaaatataaaagaatcaagtcatggacaaaatattacttttgaatatatagctaaacaaaatccagaagttatgttcgttatagatagaggaatagctactggtagtgatgtaaaagaaagctcaactgcaaaatctgttttgaacaatgatataataaaatctatggatgcatataagaatgataatataatatatttagattcaccaacatggtatgtaaatgatggtggtctaacatctttaaataaaatgatagatgatgcttcaaaagcggtaaattaataatccgatataatcaaaatgtattttttgtaaaatgattatcaaataaactaggagtttttaagaactcctagtttattttttgcataataaagatatagtttaaacaataatattatttataataagataaatctattcaaaatctaataaaatatgaagttatactagacaaaaagaataactcttaaatataattaagttatataataatatataattataatgatataattttaataggaggtttgtaattaaaaagtatataaattatattaatagtaataatctataagaacttatatattagaaaaaaatttttgtatatataaaggactctaaagatgaactatataaaacaaggtttatatattctaatagtatagaaaattttattgtaaacgcatgtatattattagaaaaaatagtttgaaggtattcaataaacataaaaaacaatataggggataaaggtgttttatgaagagatttttgaggagaattatcttagttttatttattttgttgatttttataagttttatttctattaaattaattcataatgttggagattatggaaaattgattaattatgttgggattgtttgtggagctagccaacgtctaactaaactagagatgaatcatcaaccaaatgatgaattaatagaatatattgatgaaatcctacaggagttgattacagggcatggagattatggtttagtaatcactgattgtaatgaatacaatgaggacttacttttattagaaaaaaagtgggaagatttaaatattgaaattaaaaaagtaagaatgaaagaacagaataaccagttattaagtataagtgaagagtttttttctcttgcaaatgatacagtgtttaaaatagaaaacttttctaaagaaaaaagtaattacttaatgactttaataataattatatctattataggtatattagcatgtatcatattgattttacaatatagtaaaaaaatggttagactggaaaaattaaatgtagatttaaaaaatattgcatataaagatgaactaacaggagtaaatactatagaaaaatttaaattggatgcaaatcaaaatatttgtataaataaggataagaaatttgctgtattctatattgattttgaaaactttaaatacattaatgatatatttggatatgattatggtgacatgatactgaaaagatatgctaatcttatgatgaatgacatagggaaatatgaaatatttgcaagagaaattgcagatagatttgttgcgttaagatgctatgtagataaggaagatttagtagtaagacaacgagatgtagacaatgaactaattaatataacaaatgaaattaaaaataaacatagtattactgttgtcagtggaatttgttgcattgaagatgtaaatgaaaaattaagtatagatggtttaataaatagagcaaattttgcacaaaaaactgttaagaataaaccaggtactaattatgctttttataatgacagtattcgtaaaaaaatgattgaagaaaatactatcaagagtagaatacatgaagctattgaaaaaagagaatttatagtttatttacagcctaaagttaatttacatagtcaaaaaataaattgtgcagaagctttagttcgttggcttactccggataaaggtattatatctccagcaatatttattccagtacttgagaagaatttttttattgccttagtagataagtatgtttttgaggaggtttgtaaatggattagaaagaggttagatgaaaataaaccttttgttcagatatcagttaatgtttcaagaatacaattttataacactaaatttgtagaaacttattccaatatacaaaataaatacaggatacctaaaaatactatagaaattgaatttacagagagtgttgcttttgagaatcaaaaacatcttttggaaattatacatgatttgcatgaaaatggatttacttgttctttagatgattttggaaaaggttattcgtctttaagtgttttaaaagatttaccatttgatgttttaaagcttgactctatgtttttcaaggctagtttagataaagataaagagaaaatagtaataaaaaatattgtacatatgttaaaagagcttaatatcacaactgttgctgagggcattgaatgcaaggaacaagttgaatttcttagggatattgggtgtgatttagttcagggatttgtattttataaaccaatgccaatattagaatttgaagaaatattggataaagagtttgtttataatagctaaaatgtactttataaaatatgaactaattaagtaaaattattttgtactgaataaatttttactttatttacagaatagtgattatttacagaaaagggcgaaaagtgtattcctttaagtatgggatggatagcacaaataggggagaaaaaatattggccatataagaatgcataataatataaatatttgaaaggtcagcattatataaaaattaaaaagaaaataaataatttttctataaaaaagagactatgagaaaagttactcatagtctcctaaataatgtatttattttcttcctgcaacccattttaagccccaatgaaattcagtatccatttctctatgacctttgaagtatttaactactttttcaacactgaatgtctcatcatttacattttctatcaatgctattgaacacatattatagccatttttatgttcatcaagtttgacaactaagtctgaatcttgtttttgtttgattgttacaattccatcagcttcagaccagttagctacaccttcgtatataaaagcataaataagtattctttttatatcttttattttattaccatttattcttaaattttctccttgtgtattacttcctgttctgtcatctccatctaattgagcaaaaggtggattgtctaaactaccaaaagcatttcctaatgcttgaacagcaccttttacaccatttttcatctcaaataggcaacccaaatctaaatctatattactgcttcttaaagagccaaaaaaaccctttttttgtactttttgattccaatttaaattaactaagatttcacctaaatcgctattttccttttttgtaaggtttattttttgtcccttttttaattctatagccatagtaatcttcctccacaaacatagatttatttaaatggtagcacttaataagtcaatattcaacaagattagaataataatattaaaactatactaaatatactaaaaagtaggaatcacaatacctttgtatttttcttcaattaagcttcttgctttatctgatgtaagaacatcttgtagaactttaatcttttcactgtctttatcttcagttctaaatgctaaaagatttgcatactcgtcatttataggagctgtataaattccgtttttcttggcatcaagaccagcaggtacagcataagtagtatctataaatgcagcagtaacatctggaagagaagatggaatttgagcaatatctaactctttgaattgtattccctttggattttctattatgtccttaggactaactaatccatcccctttaggtaacgttaaaagtccaatactttcaaggtatctaaggttcttagagcaagaagatgggttattgcttattgcaattgtatctccttttttaaattcatcaacagattttatcttataagagtaaagtattgctgggcatacatatagttttttaccagccattattttgtaacctttggccttaacagcttcttttagataaggttcatgttgaaatagatttgcatcaatttcaccattatttaaagcttcgtttggaagtatgtaatcatcaaagtttttaacttctaaagtatatcctttttctttaataagtggttttaattcttctaataactctcctcctggaactaaagtagcaccaacaacaatttttttatcatctttagctttagaacatccaaccacagctaaagttagtactagacataataacaaacataataattttttgaatttcatataaattccctcctgaatataattgattagttaaaaataaaataccattctttatcacactgcaaaataaaaataagcctgagtttaaactcaggctttaaaagctaatttagactcatctttcagtataatactgcaggatttagcaccaatgtatataaaaatatactggttgctgggtttcatagggccagtcccttcaccactctggataagaagtatcaatttttaattatgttataaatattatcatgattttttacgtctgtaaacataattttataaatattttaaaatctttaatgtattttatttaacacctaaaattccagaaactagaatatcagtatcagcacctaagaaatagtcatttatttcaatagaatccagagtatttctcaaagcattttcttcatgccttataccaataagtttattttctacaaatgcaacatcacattttccaaaaaaatctccaaaaaattttatactagttattatgcctttatcaacatttaaattaaactcaacatttccaccagaatattttaattcatttgaaagagtatattttggtgaattaccaaaattccaatcccaagtttcgtattttgatttagtaagcttttctatttgttttatatcatgctcattcaaacaataattagtattatcagtatttgttttagaaagataatccattatagcatctttaaattctaatatgtccatttttgaatgtaaatgttcacttatattggttacacgagattttacagattttattccttttccttcaaattttataggtttaacctttaatgcttttgagaggtcatttatttcagatgaaaataaaagagtaccatgatgcattactttgtttttgtagttgtattgagcatttccagaaaatttcttgccatctataagaaggtcatttcttccagaaaattcggcattgacatctagtgttttaagtaaatctattatgggctgagtgaatcttctgaaatcactaaaattattattgttacaagctataaatgtaaaatttatatttcccaaatcatgaaatacagctccaccaccagactgtctcctaacgacaggtatagaatattcttttatatattctaaatttatttcagaaagtgtgttttggttttttccaacaattatagaaggttcattcctccataaaataaataagtcttcatcaaaattttttagaagatattcttccattgctaaattaaaataagggtttgttttttcattataaattaataacattaaagtagttcctccatagaattgataaaatttttattatgaatacaattaattttataattcgacaataatataaaaactcctttaaattagaaattttaaaaactaccttgcaaagtttaaataaataatatatactcaaaatatgtttaataaaagtgaatagaagggtagaggcgcaataatctatcagtactaataaggagttaagcacagagagttattaggaaaggagatattgccgaagttttataatcgatgctttaagattatattgctgggggtacatagaaaatatgtacaactgtcacaggtttatttgtggtgagctatcatttaaggaattatattatatttatttttactattgttgatatattgtaatgtttaagccttgagtgtttaccactcaaggcttttttagttttattgtaacataataccctgtacagttcacaaaattaaaaggagagggagatttatatgaggaacaaaaaaattaatattatttttctgacgacaatcatgttcataatgtcaacagtaatggtttttgcagaagaagatatagacactattgcactagctaatgcagaaaaatttgggattttaactttaataccaccattagttgctataatacttgcatttataactaaaaacgtaataatttctttacttataggtattctttctggtagttttataattaaagctagtggtattaatgtttttgcgacatttatacaggcatttttagatttagtagatagagctttagtatctttagcagacccttggaatgcagggataatactacaggttttggcaattggaggagtaataaatcttgttgctaaaatgggaggagctaaagctatagctgaagcacttgctaaaagagcaaagtcagcaaaagggacacagcttataacatggtttttggggcttttagtattctttgatgattatgccaattcactaatagtaggtcctatgatgagacctgttgcagataaaatgaaaatatcaagagaaaagctagcatttataatagatgccacagcagcaccagttgctggtttagctataatatctacatggataggtcttgaggttggtttaatacatgatgcttttgaaagtataagtatagatgtagatgcatttggtatatttttaaatacaataccatttagattttacaatatattaatattagctttcattgtaatatcagcattattattaaaagaatttggtccaatgagaaaagctgagataaaatctagaagtagaaaaattagtatagaccttgatgaaggcgtagaagagttggatgatttagctccaaaaaatggagtaaaattgagtgtatggaatgctataatcccaataggaacattgataatagttgcattagcatcattttattatagtggatatacatctataatgggaggagacgataaggctctgatacaactatttacaaattctccatattcttttgaagcaataaaagaagcatttagtgcatctgatgcatctagagcattatttcagtctgcacttgttgcaagtttagttgctattataatggctgtagtaaaaaagatttttacaatatcagaagcaattgatgtttggatagatggaatgaaaagtttagtaatcactggtgtaatattaatacttgcatggtcattaagttcagtaataaaagagttaggtacagctaagtttttaatacacctattatcaggttcactaccaccattcttattaccaagtttaatatttggtttaggagcaataatatcttttgctactggaacagcttatggaacaatgggtatacttatgccacttgcaattccattagcatactcattaaatcctgatatgtcttatgtaatagtaagtactagtgcagttttaacaggtgcaatatttggagaccattgttctccaatttcagatacaacaatactttcttcaatgggagctggctgtaatcatatagaccatgttaacactcaaatgccatatgctatatttacagcagtaatcactattgtatttgggtatataccagctggacttggattgccaatatatatagtattaccagtggcaatagctgctatatttgtaggtattcaaataattggtaagaaagttgatgaagcggaaatagaacttgtagaataaagatataaataagtttcaccttttattatcactattttgttagtttttagataattttaaaaagttattgaaaataatggcgaaatatagtaaaataaaagagtgataagcggatgtggcggaattggcagacgcactagacttaggatctagcgccattggcgtgggggttcgactcccttcatccgcactttacagtacttaattgtactgaaaaaaactggggttgctggctttcggagtgggctatcccgtttttatttttttgtatatataatagattggcactttagtataaggtgctttttttataggcaaaaacagtacatttatttctgttttattatcattcatctattagaatatactttatttaagaatgtgttaataagcagtgttcacattcttgataaaatgtggaataatatgcctaccaataagcatttggtgtataagtaagagtatttatatagttgattgtgaaatgagtacaacaattctgtacagtataattggcattataattgtagcattgaatttaaagtttgcacagtcgctgattggaaaatttacaaagtggatgtcaaacatataaattttagtttattggacagttcaaggaatcagaaattggaattttatagtattaatattttatagtattaatataatgtataaaattttatagcaatgtatttcataagtataaagtgactagaattttaagaaatatacaaattctataaaaactaaataatttcaagtatattttaaaaatcttatttttcacaagtttaaaattgtaaacgatttcatcaagtctatgaatatacttttaacatgttatagtaaatctcaatataaatttacatttggttctttgtgtgttattttaataataaattaagtgaaaatgttattttacattaatatataatatctttgcataagagtgaataatataaaagagaaagaattgataataaaaacttaacaaaaaaattaatacataaaaaaaaataaatataatgtgttgacatttaattgaaatattcatacaataaaattgaaaataaatatttccaaatgagattagcgagagagtcctttatacgaaaaggcgccgaagaagaaatttaagaaatgccaatttttagagaagctttcaggcaaaaatatcgctaattgatgggactctggagagacttaagttaagatactataagtcaccgaagaagcaaaataatattaaattattaaatctttcaggtatacaaacagggatatataggctaggattattttccatgctgatatatcttttttttatgaaaaagtacaggaaataatatcaaagttacttaaatacagtaggtctaattttctagggagggttatatatgaatgaattgaaaagagtatctttgtacaatatacacaaagagcttggagcaaaacttgttgaatttgctggctgggaaatgcctttagaatatgagggtataaataaagagcatgagaaggttagaaaaagtgcaggtatatttgatgtatctcatatgggagaggtacagataaagggagcagagtcagaaaaatttatacaaaacctagttacaaatgatataagcacattaaagataaatgacattatatatacacctatgtgttatgaaaatggtggagtagttgatgatttattaatatataaatttggtgaagaagattatttattagtaataaatgcaggtaatatagataaagatgtagcatggataataaaacaaagtgaaggatacaatgtagatataaaaaatatatctagtgaagtgagtcaattagcaattcaaggacctaaagcagaagaaattcttcaaaaaatcacagatatagacttaaactcaataaaattttataagtcaattccatcaacaaaagtatgtggttgtccttgtttagtttcaagaacaggatatactggggaagatgggtttgagatatactgtaaaaataaatatgtagaaataatttggaatgaagttctaaaggttggaggagaagatatatgtccagctggtctaggttgtagggatactttgagatttgaagcagctctacctctatatggtcatgaaataaatgaacacatatctccaattgaaggtggtttatctatatttgtgaaaacaaataaagaatcatttattggtaaatcaattttatcaaaagaaaaagaaagtggagctaaaagaaagttagtaggatttgaaatgcaaggtaaaggaatgcctagaaatggatatgatataaggattggtgataaaacagttggatttgtaacaacaggatgtgcatctccaacgacaggaaaaattttaggtatgggaattatagattctgaatatgcaaaagtaggaaatgaaataggtatagcaatcagaaaaaaagttgttcctgctgtgatagttaagaaacctttttataaaaaacaatataaaaaagataatattatattaaacaaagaaaataaattttcatatatacctgctacaagtgaagataaatcaaaaatgttaaaagtagttggattaaattcggttgatgaattattttcagatataccagaagaagtaaaattaaaaagagatttaaatttggaaattggaaaatctgaattagaggtaagcaaaatagtaaaaagattgtcagaagaaaacttaagtttagaagacttgacttgttttcttggtgctggtgcatatgaccattatataccatcaattataaaacatataacttcaagatctgaattttatacagcatacactccatatcaagctgaaataagtcagggaactttacaagtagtttttgaatttcaatctatgattgcagaaattacaggtatggaaattgcaaatgcatcaatgtatgatggagcaactgctgcaatagaagcatgtataatggcaatgaatcagactagaaaaagtaaaatagtagtgtcaaaaactattcatcatgaaactttgtcagtattaagaacttacttacaatataaagattgtgagatagtagaaattgacttttgtaatgaatatgggactacagatatagaaaaattaaaagcttctgtagacaaggatacagcatgtgttcttatacaaactcctaatttctttggaattattgaagaaatggaagaaatagaaaagataactcatgaaaataaggctatgttaattatgagtgtagacccaatatcattaggagttttaaaaacaccaggtgagataggtgcagatattgttgttggagaagctcaatcacttggaaaccctcttaattttggaggtccttatgtaggatttttagctagcaaatctaaatatactagaaaaatgccaggaagaatagttgggcaaagtttagatgtagaaggtaaaattgcatatgtattaactttacaaactagagaacagcatgtaagaagagaaaaagcaacttctaatatatgttcaaatcaagctttaaatgctcttgtagcttcaatatatatggctactatgggtaaagaaggatttaaagaggttggtatgcagtctatgaaaaaagcacattatacttacaataagcttgtacaaactggaaaatataagccaatatttaaaggtaagtttttcaaagaatttgctgtacaaggaaatcttaatatagaaactataaatgataagctcttagaagaaaatatattaggtggttataatttagaatacaattatccagaattaaaaaattcaactttgctttgtgtgactgagaaaagaagcaaagaggaaatagataagttagttggaataatggagggattataatgaaagaatacaatagtttgttgatagatatatctaaaaaaggtaggaaagcatactcacttccaaagttagatatagatgatataaaaatagaagatatgattgaccaagatatggcaagacaaagtgagttgaatttgccagaagttggtgaattagaattagttagacattatacattattatcaaataaaaactttggagttgatacaggtttttatcctttgggttcttgtactatgaaatataatcctaaaataaatgaagatatggcagcacttccaaactttactggaatgcatccataccaatcttcggatacagctcaaggttctctttctttgatgtatgatttatcaagaagacttgcagaaattacaggtatggatgaagttacactacagccttcagcaggttctcatggtgagtttacagggcttatgattataaaagcatatcatgaaaatagaggtgaccataagagaactaaagtgataattccagattctgcacatggaacaaatccagcaagtgcagctatggcaaactttgatgtgattcaaatagcatctgataaaaatggagctgtagacataaatgcattaaaagaggttttgaatgatgaagtagcagctcttatgcttactaatccaagtactcttggtttatttgaaaaaaatataaaagaaatagctactcttgtacatgaagcaggaggacttttgtactatgatggtgcaaacatgaatgctattatggggataacaagacctggagatatggggtttgatgtggttcatcttaatcttcataagactttttcaactcctcatggaggtggaggtccaggagctggtcctgttggagttaaaaaagaattagtaccttttttaccaataccattaattgaaagaaaagaagataagtatgtactaaattatgatagagaaaaatctattgggaaaattaaaaatttctatggtaattttggagttcttgtaagagcttacacatatatactaactatgggaagggatggacttaaagaggctagtgaaatggcagttttaaatgctaattatataaaggaaagtataaaagatgattatattttgccaatagataccttgtgtaagcatgagtttgtattaggtggattgccaagaggagaggccaatataaaaactatcgatattgcaaaaagactactagattatggataccatcctccaacaatgtactttcctcttattataaatgaggcacttatgatagaacctacagaaagtgagagtatagagacattagatagttttatagaagctatgaaaagtgttgctaaagaggcaaaggaagaaccagaactattgaaaactgctccacataatactttggtcaaaagagtagatgatgcaagggcagtaaagaaacctatactaacatggtcacaaagataaataattaaaaagtagagatttaaagtataaagagaattaaatttgtaagaaaaagctatctaacttaatccagtttagatagcttttttgtatattagtatgtatggtattttctatataaagttttaaattatattagtgcttatatagaatattgatatgatgattatgtatagatattaataagaattgttgaatttatcttgccttaactttatttactcttttatcttaagaaaaacttaactaaaatatagcgaaattcataaaaatttaggaaatcttaagaattataatatttaaatctttagatttatattttattatataaactatagaataataaaatataaaaattgagaattttataatatatttgtagatttgagtataaaaaagtgctaagttgaaaggagtaaaatatggataaggttaatttagaaaggtatagttgtgatataaatgttggtttaaataaaaatcaacttcaaagtagaatagatgataatttaattaatgcatttgataatggaaaaaccaaaacatataaacaaatttttaaagacaatatatttacactttttaatctcataaatattgttttagtctgtttattagtttcagttggttcttttaaaaataccttatttatatttattgctgtaattaatactattataggagtaatacaagagataagagctaaaagattattggacaatctatctgttatagtttcaaataaggtatctgtcataagagaaaaagagaaaaaagagattgatgtacaagaattagtattagatgatattatgattttaaaaacaggtaatcaaatttgtgcagattcaaaagttttaaatggaaaattagaggtaaatgagtctttggttacaggtgaatctgatattattataaaaaataaagacgattttttatattctggaagttttgtagtttctggagaagcttttgtaagagttgaaaatataggaaaagataactatgcaaataagatagttaatgatgcaaagatttctaaaaaacataattctcaacttagaaattcattaaattcaatattaaaaattgtaggtataataataattcctttaggaattatattgtttgcaaaacagcattttggaaatggagattctatagctacatctgtagtaggtacagtggcagctgtaaatggtatgataccagagggattaacattacttacgagcattgctctagctgtaggaactataaaacttgctagtcataaaactttagtgcaagaactgtactgtgtagagactcttgctagagttgatacactatgtcttgataagacaggtacaattacagaaggtaaaatgcaagttgatgatatagtaatgttggaagaagtggatattaatgaaataatggggaatatatgtaattctctcaaagatgataatgcaacactaaatgcaataagagataagtataatgttttagatacgtataaagctaagaatttaataccattttcttcagagagaaaatacagtggggttacctttgaaaataaaggtacatatttattaggtgcatttgagtttatatttaaggaaaaaaataaaaaaattagaatagaagttgaaaaatattctaaaaaaggaaacagagtaatagttttagctcatagtgattcttatatggaagataataatattcctgaagatataaagccactagcttttatattgatattagataaaattagagatgaagctaaggaaactttagaatttttttacaatgaaggtgtagatataaaaattatatctggtgacaatcctataacagtaagtgaggtagctagaaaagcaggtcttaaaacggctagtaattttattgatgcaacaacacttaaaaatgataacgatatatacgaagcagttgataaatacagtgtttttggaagggtaagcccacaacagaaaaaacaaatgattttagcattaaaaaaacaaaatcatacagtagctatgactggagatggtgtaaatgatgtgctagcgcttaaagaagcagattgcagcattgccatggcatctggaagtgatgttactaagaatgtttctaatttagtcttattagattcaaactttgcatcaatgccaaaggttgttatggaaggacgaaaggtaattaataacattcaaagagcatcttctttgtttttagtaaagacaattttttcattcttcttgtcactattaacattattcttcttcagtagacagtatccatttgttcctatacaattatcactaattggagctgtaacagtgggtataccatcattcttcttagctcttgaagcaaacaaaagtagaatttcaggaaactttttactcaatatattaaaaaatgctttaccaggagcactatgtgtgacagtaaatgtaattattgtttacaatatagttgaatatttaggctatagttcaagtgtattttctacaatgtgtgctatattaactggtgtatgtggtcttttaatattaagacaacaatgtttgccatttaataaagaaagattatttttaattgtaagtatgactattgcatttgttattgggattctatttttaggtggattattctcatttgtagcattgagtagagaattaattctcataactatggcattagcaatattaatgccaattatgataaaagttatgttatttgtcttggatgagatattagagacaattgttccagatttaaattaattttaaaatgatataaataagagcagttttagttgaactgctctttttagatgtgtttaattttatataagaatatgtatttttattaatcagctatatatgagcaacagtagtcaacaacttcattaacctttaaatcaaaacttgaatcactaggaacattaaatttttgcccttctttataagttacaaactcattgcttccaggcagttttacatccatacttccagcaagcatctccattatttcttcttctctagtagaaaaagtatattctcctggcaacattaatcctaaagtttttctttctccattaggcagtattattactctgctacttaccttaccatcaaaataaacgtttgccttctttactgcagtaacattcttaaattcactcattagataaaacctccaaaattatttgtacatatatattatataaaaataatgtaaaaaatgctatatatttgcaaaaaaaatttagtatttattaaaaaaattaataagaataaaaaagagatgaaattgcttaaattgataaaaaatataaaataaattgcaaagtaagcaagaaaagaataagttgaagagttatatattataaatattaaaaattttagtattaataaaaaagatattacattaatatgaaaatataggagattagaagtgtttgataattacagtttatatattataataaaataaattgttaattttaaaagaggtgaattttatggcacatatatgctttgaggatatttgttatttgttattaaaagaagcaatgaagttaaagttaataccacataataaaattgtattatttgaagatgatttatcaataggtaatatttttgatgtaaataactacgaattaagagaaaatatttttaagattagaaatgtttttgaaaataatccgaaactattattcaagccagatttgttagaagataggaaattatcaaaatgtagaaatataataatatggtgtgcaaataacccaaaagatttgtgtggagtatattatgtagtgagtaagtttcaagataaaaatataaagattgcattagtagatgaaaaaaagacagaagatgctctaattagatattcatttaccagtgaaatgtctccagaagattttccattctttttagataagacactagaaattggctttaatgaaaaactagaatttaaaaataaatgggatgtgttagttaaagaaaattctatttttagagcattagtaggtaacgaaattaaaagtgttgaagaaacttattttgataaatatatattaagaaatatcagtgacaaatggcaacctttaattgaagtggttgcaaactgtatgtttgaagatgaaatgcgtgtaaaagattggtttatactttggagattagagaagatggcaagtttaaaaatagtaaaaataaaaggaagtaaaggggatttttattctgataaggagataagaaaagtttaaaaattgaatttataataaattgtattaaataatgggtataactatgaagaaaaatatcttaacagtattaatattataattagcaataagtataatatttattctataatttgaaaatataataactaataccttacgaataagtgtgctaaataaaaaagaaatacttatttcagggatattagtatatattttaactacatttttacttaatagtattaaaatatggtgctatagagtaaataaactagaaaatttcaactttaatattacaatagtttattctaaatgccacttctttagatataggagatgaaaagcaagttttaattttttttaatcaatacatgttagatatatcattgtaaattaacataactttgaatataataatgttcagaaggcaatatttttgaggtatgaatccaataatatagtcttatgattgtagatatcaaaaaatataagttactaggaatacgttttgtagatttatatatgattaataactaaagctataaataaacaaaataaaaagagtatgtttcaacctatagcttttagatttaaaatatactcttttattaattatagttgcataaattaaccataatatataattaaaatttttattataattatatattaggttcttcaattagttttccacatacatatctatgaatgatatttctatcatcaccaacatagataaatctttcaagtctttcaagtatagaataattgtcatgatttaaatttgaatcatcaataatcaatgcatcaaaatcataaccttcttcaaagctaccaacttttccaaagaaacttccaccacttttggttgcaatataaaaagcctcagataaagataagaaattatacttcttaccagaattaacccaatataatttagataattgtattgcagataccattgctttaaatattgacaatgtatgtccaccgcttatatctgatccaagtgctaatctaatattattatcgattaattttctgataggcatagcaccactaccaacattaaagttagaagctggacagtgaactgccataacattgttttctctcattaaatctatttcatcctgagaacaatgaacacaatgagccattaaagtaggagtttgaccaaataaattatatctattatatgcatctccatagaatttagattcaggttctagacttctaacccattcaatctcatcataattttcagataagtgtgattgcataggaatattatattttaaacataaatctcctaaaccttttaaaagttcacttgtacagcttggtataaatctaggtgttattattggttttacaatagaatctgtatcactatacttatttataatttcttctgtatcagcaatagaatcctgagtgttttctaataaagtatcagggcaattcatattcatatttactttaccaacgtatgctccaagaccaacttctttgaatatatccataagtttcatagaggcttctttatgtactgttgcaaacactgctattcttgtagttccagatttccaaagttcttttacaaattttttatacatttttgttgcatattctatatctttataatttgactcttctggaaatgtataagtttcaagccatggcaaaagctctttatccatagccattccaagatttttaaattgagaggcatgggcatggaggtcattcataccaggtattataagcttatcagtgtaatctactacttttaggtttttgtattccttaggtatctctttaaatattccctttactttacctttttccagtataatataactattttcaaatactgtgaaagtttctgaagtttttgtaaaaattatatttccttttaatacttttaacatataggtctccttagttttaaatttgttttaatatatgtaggtaaaattttgttttacaaatcaaaattttaccacatgtattatatcaaatctaaactataaatactattagataatagcaaatattagtgaaatacagttgtttactattattatatataactgacacttaagtgacatttaagaaaaatataatgcttacttacataaaatggaatgttatttaaagagaactttgattatattttcaaaagcttttttatccatatcgtttaaaacaagaaaatatctattcatagttatttttatattagtatgtcctaatctttcagagatgatttttatattagttccagctagaagaagaattattagaatagataatatagtaagtatttacaaatatgtaggtgttcttaaattgataaattattccattttaattttatagtttgaattttatgatataataaaaatatataaattttgcagtgagcgatatttttgataaagtagggtttaacagttgcaatgtaagggattgagggtgtatgataaatgttatcaattgcactactcatggttcactgcaaatttgagagagttgtatgtgtgtaagtactgaaaatacttagtttattttggggttttatattaactatgtggtatgtaaatttaatttatctataatttaaaacggtgaattacatatgttttatattaactatgtggtatgtaaattaaagaggggtacttcgtacttttaccactcaaactagttttatattaactatgtggtatgtaaataggtcaagcatagattttgcaactggaagataagaagagttttatattaactatgtggtatgtaaatgttttagaacagaaaaaattgtataaattgtggaatggttttatattaactatgtggtatgtaaatttgtaaaatgtaaatagcatattaatttttctttcacgttttatattaactatgtggtatgtaaattggagcattatgtttttaggttacggagcaacatttagttttatattaactatgtggtatgtaaatggtgatagtggaagttttacttatacttggcgtgctggttttatattaactatgtggtatgtaaatttcagaatacttagctcctgcgcctatatcgtctgaatgttttatattaactatgtggtatgtaaataaagttttgcgcattgtatgtgtgcctagattatctgttttatattaactatgtggtatgtaaatatgtccccacatcaattttcctccgcatgaaaaaatcgttttatattaactatgtggtatgtaaattttagaaacaacagaataaacataatatataagcatagttttatattaactatgtggtatgtaaatctatatcgcatattcttttatctaggtcttcttttcgttttatattaactatgtggtatgtaaatataatcttgttatagactttactattgttgtaatagagttttatattaactatgtggtatgtaaatcttaccagaccctgcaacactaaatgacttacatagttttatattaactatgtggtatgtaaattcatcagtatttgtaaaatgctttaacttatcataatgttttatattaactatgtggtatgtaaatttttacttttcctttctatgtgtccaattcggacacattgttttatattaactatgaggtatgtaaatcttatacttagttagaactatatatcgacacaaatatgctttatattaactacatgatatataaattgcaatttttattcgttgtccaatcgcttgaaatttgttttatattaactacgtggtatgtaaatttgcaacaagtataggtaaaataccccaataatttatacagcattttctactttaaaatataattattttttatcatttgtagtaaataattaccagataacattgactttagttttaatgattaaaatataaaagtagaataattataaaaagtattgaaaagtttataaatatatataataaaacttaatgacaagatattagatataaaaaataattatcttataaatagattgaaatttatgaatattcatactataatttaaatataaagagatgtcctttaaaaataaaaattaaaaaatatttaatgctactacaataggaactagaactgcacttaataaatatacagaaattagatttggctcaatataaaatacaaatatagaatttaggtgttttttatgaaaaaaattttatatgctttatatagtttcattgttattatagctaattttagattaaaagaaaaaaattataactttattttattagcaatcttttttatactgctgttaattcaaaatggagttttaaaaacaggttatcaaaatagagctacattttatcaagataattattttaatggagaggataaaaatgataagataaaatttataactataaagatttttatatttttgtcattaccattatgttttaatatactattcaattatttaacttcttaaattatatttagatataggagtgttatgataaaagtaagattatgtgttgtttatattaaatataaagtgcatatagtgataaaacaaaagtttcatataaatgaagaaaaaatataaaataatttatttaactacttaaaaataaactaaaagggataataaaatagcttttaggttatggtaataaaggtatttaaaaagagtgcataagcactccaattgtgagaaatacatacacaaatcattattacaacaatgaaaaatgtacatataagagacgttttgtatttgttttaagtgataatattttaatactaactaaataattatcacaataataaaaaagaaaaaggagtattttgtactccatttgtcaaaaatataaaacttttatataagcttattataacataattgataaaagtgtaaagctatataatgaatttataaagaaaaataaaataaaaaagataaatcctaatcaaaggatttatctttttgtatagaaaataattattctattattaaatggcatggctaaactggataataatttattattactgctttcaatgttttttctccttgattatggtatgtatgaattgattcagctgaaaaacaaatagagtcattttctctaagttgataaatagagtcatttacttctaattttaattgaccttctataatcataatatattcctgtgatttttcagaatgaccaacagatgtataactatgaccttcttctaattccatttgaaataattcgaagtttctagttggtgtattgggataataacaataaagacgataatctttattttctgaaacttgtacatctatatcagtttttgatacaataaaagtttcattttgaggttgttccagtattgcagtatatggaacatttagtccacttgcaattttccaaattgtgtttactgttgggtttgagtctcccttttcaatttgcgaaagcattactttacttacgccagataattcagcaagttgacctagacttaagttacgttcattacgtaatctatttaaatttttagcaataacagtattaatactcatagtaactccttaaaatgtaaattattgacaaatataatttacgaatgtataatttatttaacattatttataatttacaaatgtataatataatgaacgttaaatacactgtacatccgtaatataaattatactgcataaagagttgtttttcaacggatgatagttgagagattaagggggaattgtaatgcgtgtacttaataatgttacagaggctataggcaatactcatatgttacatttatccaaaatagcagatgaatttggagttcaaggtaatatttatgcaaagatggaatacttaaatccgggatttagtaaaaaggaccgtgtagcattacaaatgattaccgaagcagaaaatgcaggtttattagttccaggtcaagcagttgtggaattaacaagtggtaatactggaacaggactagcaatagcttgtgcatgtaaaggatataaatttatagcgtgtatgtcaaaaggaaattctatggaaagagcaagaatgatgaaagctttaggtgctgaagtagttcttgtagaccaaatgcctaattcagttcacggacaggtatctggtgaagatttggcacttgtagaaattgaggctcaaaaaatagcaaaagaaagaaatgcatttagagcagaccaatttaatttagaagcttgtaatcatgcacatgaaaagtatacagcagaagaaatgtgggaacaattggatggaaatattgatgtatttgtagattttcttggaagtggtagtacttttgcaggatgttcaaaaacacttaaaaaacataattcttctatcaaatgttatgttgttgaacctgaaacagcagcaatttattcaggtaaagaaataactgaccaagggcataaaatacaaggtggaggatattctatggatttgccattagtagacaagaaacttattgatggttatattcaagttacagacgaggaggcaactgatgtagcaagaaaattagctaaattagaaggtgtatttgcaggattttcttcaggggcaaatgtgtgtgcagcaattaagttgttaaagagcagtgaaaaaggaaaaaatatagttttaactcttaatgatagtggtttaaaatatttaagtactgatttatatgaagaattgtaataatagcacaatagttatgcaatgttttttaaattaagtatatagatttaaattataaaaagtatctcaatgtgatttttgaaagttataaaagagatacttttttattttgtaaatatggagtatcctacttataagtattaagctatatagatattgatgattagctatgcaataaaaaagagtatgtgtttttgcatttatacatcataacttggaataatacatattaatgttctaaatgtatttaaaacatatgataaaattagaacaaacagatacaaggagataaacatgcaaaagagaattttaagaaattttatatttacgggtaaaaatattttaagtaaacttgtttttataataaaatataattttagtacattaattttatttgaattatttcataaaggattagccttattttttatatggccatctattagatatatatttgatattttaataaaaagtttacatatagtctacctaaatatggataattttataaaagttttgaccaatcccatgtcaatagttctgataatactatcagttataatactagctttttatgcattttttgaatttacctctgtaattatttgttttaataaatcgataaaatatgaaaaaatagggttatttgaactctttaaaatatcatttaagaactctataaaattgttatatcctaaaaatatactattatttatatttgtgatattaataattccattagtaaatacagttttaatttcagggtttataggaaaaatacaaataccagagtacatattagattatataaagtctgatataattttaaatataatctatatgatttttcttttaataatctatatttcggttattagatggatttttagcattcatgagataactttaaatacagaaaattttaaaagagcaagaaaagaaagtgttaatcttataaagagaaagattataagaacaattatttattcattaatattatctttagtagtagctattattggatatgcgatttatcatagtggaattatatttataggcatatggactaaatattgtactgatatggaatttttgaagaatgtatttataaatagatgtattgcatttgaagaatattttagattgattttatcaatattcatttttatattggacattggatttatctcagcaacttattatcaatataaaggagtaaatatttctaaaaataatattaaaaaagagaaaaaatctatatcaaaaattgtttttaatttagtattaatattattgatttcttatatagagtcagttgcattttcttcacatataaatggcatgtttaatacgtcattttcattttatacaacagcaattgctcatagagcaggagctgaaatggctccagagaatactttggcagcaatagaagaagcttcaaatgctaaagctgattatgcagaaatagatgttcaagaaactaaagatggagaacttattgtacttcatgattcaaactttaagagaactacaggagtagataaaaatgtttgggatgtaaattataatgaagtaaagacatatgatgcgggaagcttttattattatggaaaaggttattatgatgaaaagtttgttggggaaaagataccaacactcaaagaaatgataaaatattctaaaggtaaggtgaaattattaatagaaataaaacttaatggacatgaaaagggagacatagtaaaaaaagttgttcagttaattaaagaaaataattttgaaaatcaatgtatagttgcatctatggataaaactatattacaaaaagtaaaaaaactggatgagaatttactgacatgctattttatggcaattgcatatggtgatttttcaaagttaaattatgttgatatatatggaattgaatcaacttttgttaataaaacagtagtagaaaagattcataaaatgaacaaaaaaatcttcgtttggactgttaatagtgacagtttaattgagaaaatgcttgacctaaatgtagatagtattattacagataatccataccttatagagagtgcaatttattggaagaaaaatggatttattagtcaagtgtcagattatttattttaaatattctataattgtattatccagtaaaagagatattattaaaatcaataatatctctttttaacataaataaggttgttaaattaaggttattcttataaaaattgtgcttatcagctataaacaaggaataaaagtgaaaaaattgctctgagattattacagttaaaagagttttaagatgacagagagatagattgtcaactgtatatttaataaatcttgttatttattaaattttatataagtaaaatatataaattaataaatcttatgctagaatatatatgaaaaacaatataaatttggaggattaaaaacatgacagagcgagaaaaaatgttggcaggagaactttacgattgtggtgatattgagttgttaactcaatggcataaagcaaaagacctagtaagagattataaccaaacagattcctcggatttggaaaaaaaagaaaaaatattaaatgaattacttggtggtaaggataaaaacttatggattactgcaccgtattatgtagattatggaaataatatttattttggaaataattgtgaagtcaatatgaattgtacgtttttagatgataataaaattatcattggggataatgcactaatcgcaccaaacgtacaaatatatactgcatttcatccaactaatgctggtgatagatttggtaatgtcaaagaagatggttcatttgaattttgtaaaactcaaacagctccagttactattggagataatgtttggattggcgggggtgctattatcatgccaggtgttactattggagataatgtagttataggtgcaggaagtattgttacaaaagatattccaagtaatatgattgcatacggaaatccatgccgtattattcgagaaaacaaataaagttaaattttcttgcaaaatctcaaaaaacacctttcttactttatacatagggtattttccaatactttcacatccatattcatttgttaaatttttgtggaatgtagtttttatcacttctatcttacatttccaccattttttataaaagtcattcctttatagatttatttataatagtatatattctatttgatgtttgaataagcacttatttttaagtaaaatactaacttttaggttagtattttgctatagtatgatgattaagtaagaataaaatactataatacataaagcttaataaatataatttttattttacttagatattttcttttgattagtaatcaaaagtggttataatttttttaattaataagagtaatatttattttatgaaagaggattatattaatatatatttaaataggaaaaattgtaaaaagcataaaaataatataattaattaatgagataaaagtggataaaaatattgggagtttaatttttgtgaaattaaaaatattaaagctaatctacaaatatagaatatattctaagacgaattttcataattactaaataaaataaattaatcaatatagttttttaatataaacaaaaaataaaaaatttatataaataaaatgcttgtttttcttgtattatttatataaatattgaaatttgtctagttatacgtttttattgaccagttatgcagttgatattgaatattctaaatattggtgttattttataggtggtttaaacatattagggggattttatatatgatttgtatgatttatagagaatgtataaaatagtaaaggtttagagcatgtttagtggattgcagaatatgcatatagaatgattcttgtaaattaagttagacataggaaatatataatttgtattggatgattgattttatggtgtatgcttttaacttctataatgggaaagtaaagatgtactcccaatacatctttactttagcagaagttatagttacttataaagtacaaaaaattatatatttattagagtagataaatctaaaaaggtttttctagaaaaatttaattttaattgtatctacttactaataataagacttgatgtaagcaggtttcaactaccgtttctccatattctgatataaaatcatctaactgtgtatctaaaaaattacaataatcatatgaactactgatgtaagcagttagtatatgtgtacatttgtctatttctccaataaacatattatccatccccctaaaaaatttagtaaaaataaaaagtcgcattctattagtcaattaacataatttataaaattttttagtactagtttctataacttaactccttaaggttaaatattcccagttttaccaatttagttttattctacaagtatataatactagaagatgcttcattattcaacatgcttgtttgagaatagaaaatattctaaaattataattgtttttaaaaataagattcaagataaataaagttatatgcaactatttaataatctttccataataaggacagtaggttctattcttaaaaaactccatctttaaatttaaagaataactacaatttgaacaacaataaaatttccaatcaataaaaatatcaaaaataataaaaataattgaaaatgtataatttcccagaaaaataataaatgtaactccaataataaacacacctataaattataaaataatttaagctttatttaaggttagtattatatttatataagatttaagttttaatatatatgtgtaattaaaatgatttaggaggagaaatatattggtaaattgggaaataaaaaaattggctaaatctaagagtatgtttatatctctagggatattagtgttaatactaatgattagtatctttattacgcctgttttagaaacagaacgttattatatagataaagaaaaaggatgtatagaagatacgagaagtggtatcgacataggtaatgagaaatttcaaaataagattaatgttttaaagcagttttcaaatcaaacagatacaggtgaattttctaaaaaaattgaattaatgtcaaagaaaaaacttgataatctaagtgtgaatgaatataaggatattagtttttggaaagtatttaactatagagttacaaattcacttataaatgtaggaatgttaatcattatatctataattatatccaatatttacgtagatgaagtcgttacttcggtaaaagatatcatactatcatcaaaagagaagaaaaaagcattaaagtctaaaatatttgttgctttattagttccattagtaatttattctgtttatttaatgggaatatttattataacttgtatgcaacaaggagtacctgttaatggagacttagaatcttttagaatagtagacaatgtagttgcattgaaaactaatttaagtataacaaagtatgtaatattaaatataggcatagagcttttgatgtttgaaggatgggccatgatagccatatttgggtcttttataagtaaatcttcaatatcttcaataagtttttttatatttattatatctataactaagataatgtcggtaatccatatattacctaaaaaattactttcagttgtatcaaatgtaaattattatgatttgatatttggttttaataaaataataggaaattatctaggtgatattatgatatttaaagtgaatatagacattgtcaatatagcaataggacttttgatggcaatattgataggtgctatgtcattatgttttttagtaataaaatcagattatataagtagataaaaggggagttaagatgaataaattagaaatagaaaatctttcaaagatatatggtaaaaaagtagcaaacgacaagattacagtaactctggaaaatggagtttatggtcttctaggaccaaatggagcaggaaaatctacattaatgaaacaaataacaacgttgataaaacctgatgaaggtcagatactttataatggtgaggatatatttaaaatggatgctaattatagaaatattttaggatatttgccacaagaatttggagtttataaaaattttacagcaaaagaatttttacagtatattggagctttaaaaggtttaaggggaaaatatttaaatagtaagataggagaattattagatttagtaggtctttacgatgtgagaaataagtctataggaaaattttcaggaggtatgaagaggagagttgggatagcacaagttttactaaacgaccctaagataatagtctttgatgaaccaacagcaggtattgacccacaagaaagagctagatttaggaatttaatagcaaaaatgtctagagataagataataatactttctactcatataatttccgatatagaatcagttgcaaaggaaacaataatgattaaagatggcaaacttctaatgaaaggaacacacaaagacatattaagtcacatggaaaataaagtatataatgttcaagttaaaaatgaatgtgaagttgatgatatacaatctaaatataaggttgtaagtattcaaagtgatattgattcagtagtacttagaattgtttcagaggatattccaagtggggataatatacaaccagttcaagcaaaattcgaagatgtatacatgttttattttgatttggaagatgcaagggaggtgtagtagaaatgatgtatttagttaaagctgaaatgataaaaatattaaaatcaaagagtgtttggataatttggctgtttttaatatttttgggatttcttctgattagaaagtttgatgttttagatacttatgcagatatattttacaagatagaaggctcaatacctctaataggtttgataatgtttataataacttctggaaattacattaaagaatatgattctaatatgacaggtttaataaatacaactaaaaagggaaaaaaatcagtagtattatcaaaactagtagctaatggattaattttatctattattaatatttcttttatattgttagtaggaattagaggttttagtttttttgattttaaaaatttaaatgaaccgattcataacttatggtactttggaaatagtaatttaaatcttacagtaatacaaatgtatataattgttatattgactactatttttgcttcttttatatttgcacaaataggcttaacactttcatctatatttaaatcggctgtaattccatttatactaggtggattgataatggcaattccatactttagtgtaggttttataccagataaagctataaaatttatgtcagtgactccaaattggattatgatgagccaacaaatggttaggtataatgtaccaagtattttgatagttttttctatagtaatctcaattatattaatgatagtgttaactaaaataacatatgaaaattttacatcaagcaaaaggttttaactaaaaataatagtaattttatttatattttagtttaattaaaaataagataaatgaattttagataaaatatatgctaatatatatgtaaattattacaggaggttgtttatggaaaatcgtgttttaataatagatgatgaagtagaaatattgaagcttttagaaactgtcctaaaaaaagagggccttaataatatatatactgcaaaaactaaaaaagaaggattagaattatttaaaagtattaatcctgatttgattgtattggatattatgttaccagatggcgaaggttatgatatttgtaaagaaataagaaaaacctccaattctccaataatatttttatcagctaaaaccgaagaattagataagttacttggactagcgattggaggagatgattatgttacaaaaccttttagccctaaggaagtggcttttagagttaaagcgcatttgagaagattaagttattttagtgatgttcaaaacgaaagtaaaaatctaaataagaatgaagaaaaaattatatcatttggcccatatatattaaatgaaagtagggcagaacttataaaagatggaaaatctataggactgtctgcaaaggaactaaaaatcctatctttatttgcacataatcaaaatcaaattataagtaaagaaaaactatgggataaagtgtggggagaagattatgttggatttgacaatactataatggttcatataagaaaaattagggaaaaattagaggataatccttcaaagcctgaatatattctgacaataaaaggtcttggatataaattagcagtaaaggaagattagaatatgaagtggaagattactagaaattttatatttacaattgtgtttgtagctatatcagtagtaattataaatattatatctatattgtatgtgatttcaactaatagcttttttaaagttgtagattctggaaataatcctgaagaatttgcacgttcttttgaaaaagatttatatgaaaaagatggagaatttaaactatctaagattggagctgaaaaattagaaaaatcaaattcctggatacaggttttaaatgatttaggagaggaagtttatggagtaaatgtgccaaaggatactccaaaaaaatatacaccctttcaaatggtgaataattacaagtatatagaaacaaagtatgttaattttgtactagaaaaatatttaaacaaaaaacatctaaacataatagtaggtatacctagtagagatatatcaagaataattttaacctattctcaaaataacattaaaaaaactttaaataaagttatcattataacactagtaattgatagcgtggtagctttaggtgtaggatatttatttagtagaaaacttacaaaaccaatttcaagcgtactatggagtattgagactatggctaatggaaattatagtttatatcttaaggacagaggtatatatgaagaagtttttaaaaatataaatatgttagctgatactttaagagtaaatgaagttgagagaaaagaaaatgaagagttgagagaggaatggctggcaaatataacacatgatataaagacacctctagcatctatacaagggtatgcagagataattaatgacaaagattatgagtttgaagaagatgaaatacgagagtatacagaaattatatataataagtctaagtatataaaagatttagttgatgatttaaatttatctactcgattaaaaaataatactatagttctggacaagaaaaaaataaatttagtcagtttagtcagagatataataattgatattttaaatgataatagatataaaaataggaatattgaatttgaaagtaatgaagatttaattgaagtatatgtagattcaatcttattcagaagggctataaccaatcttatatttaattcaatagttcataatagcgaaggaactttgataagtgtagaaattgtaaaaaaagataatatagaaattataataaaagataatggaattggaataagcaaaagtgatttgaaacatatttttaaaaaatattatagaggtactaatacaggtgagatgcataaaggttcaggtcttggtatggctatttctaaagaaataatagagattcataaaggtaaaatttatgtaagtagtgaaattggaataggaacaaaaattattatagagataaaacaaaattaggagatatgatatggatttttttaaaaaaggtataagtgggtttactattaagattttagcattaatatttatgacatttgaccatatagcagcatttatgccacaaacaatgcaaataccaatttggtttcattgggtaggcagaatatcagcaccactgtttatattcatggctgttgaaggattttatcacactagtaacagaaaaaaatatataagtagattgtatatttggtctgttattatggctataggaaatcaaataattaataatgtattttcacatccagaaggagctataattataaataacattttttcaacattatttttaatagcgatttatttacaagcaatagagttcataaagaaatttagaaaagagaaagaaattaaatattttattataggattattgatgataatcattcctataattttaggaatatttacagtagctttactttttaaagtcactaacagagttattactttatttatgattttggtaccagtaccatttttagtagaaggtggaccaatttggattatacttgggattattttttatttgtgtagaggtaaaaagttcagtttgagtatttgttatgttttgatgtgtatatttatatttacaacaatgtcaaatggagattatagtttaaaaaattctattttacaaaattaccaatggatgatgattgcttctctacctttaatgttactttacaatggagaaaaagggaagagtatgaagtatttattttatttatactatccaatccatgtatatatattgtatatcttaggaatatacttaataaatggtttttgattgtaagtgatatttttaatacaaaatgaacaatatgaggattgttttaggtctattaaaattgttatttagatgagatttgtagaatatttaaatttatgagcagaaattcagttattgtaatttcaataacattagaatataatattataatttatttagaaatatatgatgttatatatggtttggttattaatgtaataataaaatagaggtttgatataaaattcaatacctctgttttagtgttttttatcctatatttatacttattttatttataaattagtgttttgttttaattaatattagtgcattttttatttattttataaaattagtcataattgtttcttcatattgtggttctttaattccagcttttttacctgctgatatacacttaagaagccatgccatgttttctcctagagttcgcatagtctgtaatccttcttcatctttcataacatcctctggagtaaagccatgtacctgattccaatactgtgatgatacaataggcatattgctgattgaaaaatatttatttagttggtcaaatgttgcacttgcaccaccacgtctacatgacacaactgaagcacctaattttgtagccatgcgacttccagctatgaaaaatagacggtcaagaaaagaagttaattgaccagttgcactagaaaagtaaacaggagaaccaataataataccatcaatattatcgagatcttcaatcaattcattaactttatcatttcgaatacattttccagtttcaaaacaggatgcgcaactaatacatcctgggattgcttctttacctaaatacagtatttctgttttaatatcgtgtttactcaatactttagtaatctcatttagtgctgtataagtacatccatattggtttgggctaccgtttatcaataaaactttcattataaatttcctccaatgaattttatttaatagattttctaagagatattattttttataaaataggattttcatgaatattatcaatttatatagaaatgtctaatcttagaatcctatttaaaataactctttttttagtaaatacacctcctattataaaattgactttcaattattcttacactataattttattataaattattctaaaaacaagtacgcacatttttgttcaatactaaccaaaaggagagtgtaatatatgagtatagactgtatatcaaatacagatttaagtgaaacaggatttagttatacactttcactgattagtggtaaatataaaatgataattctttactgtcttgtagaatttgaagttgtcagatataatgcattaaaacgttatataaatactatttcctataaaactttgagtttatcattaaaagaattagaagcagataacttgattattcgtactgaatatcctcaaatacctcctaaggtagaatatagtttatcagaaaggggaaaatctctgattccaattttagatgcaatgtgtgagtggggagagaggaatagaccttaattttgtatctgtagatgccataaaaagactgtgagtaaaattgtttgaataatctactcacagtctatatttaaattaatagttagtatttttaatttataaaatactaaaaaatttattatgaaatttcaccaccaatttcttttacatcttctttgtatataatacaagcttctatagctaattctaaaccttttactatttcttctaaagacatgaatggtgtattttttttatttattacctgtgaagttgtatatgggatgtgtataaatccaccctttatattaggatatttcttgtctatcatataaaggattccatacatcacatgattacaaacgaatgttcctgcagtgtttgaaacactagctggaattttattttcattcatatgttttaccatggcttttacaggtaattttgaaaaatatgcaggttcaccatcttcttttataatagtatctataacctggttaccttcattatcttttattctaaaatcatctatatttatagcaactctctcaggtgtaatgtcaaatctacctccagcttgtccaactgatattactatatctggattgtgctcttgaatagctttatctatagcttcaacagattttgtcataactgttggtatagttatctttatgatttctgcaccgtttatattattattgaccctttcaactgcttcttgagctgggtttattagttctcccccaaatgggtcaaatcctgttaacaaaattttcattattttacctcctaattatattaaaatcctaaaaagtacattactaatatgtgggctataattaataccaaagcaactggagcttgatattttataacaatataatcatttttacattctagcaaggctgctggaactatattaaaattagcagccattggagtaagtagagttccacaatatcctgctgttaatgctaatgctccaattatagcaggatttccaccttgagacaatacaaaaggaataccaattcctgccgttatgactgaaaatgcggcaaatgcatttcccattatcatggtaaatataaccatacctaatacataagctataacaccaaataatctgctatcagcagggactacaccagatatcatggttgaaataacttcgccgactccagcctgagtaaataaagctcctaatgcaactaaaagttgtggtaacatactagcaggtcccatttgttgaagtaatcttgagccatcttgaactgatgtagcaggttttgctttagttattataagggctgatattaatgcaattattgaacccacacctattgcaaattgagaagaattatcaaaattagaaaggctcatagctactactactgcagcaaatgctaatattaatgatggtataaatattttatttttaagtttgtctgcttgttcttttccaaaattttcatctggttcttcatactttgcaaatacaacttgtttagaaagtgttaataaactagataatattaatattattcctattatattggctggaatcaatctaccaaatatgaatggcagtgatataagtatccaaaataatgatgtaccatatttcttattgttatttatggtagtaaaagacttatatgctataacaatcattaaaaatcccattagtgcgtaaaagatttccaatgatatgtttataaaattttgcatttttattcctcctaaataaaactattttttatgacttttgtttaattttttatcatataaggtaaactggattgtagccactacaagtgctattactgccataatagtactagcctttacaatattaagtccagttacattgtatccaaattgagttagagtagatgctataagtaatactccactactacctgcaaataagttttgaccataaaaatttccatagttttctgatgcagcagataatgcctttatggcttcttcatccgattcttttagttcatcactattacttaaaccagcagcttgtgccataggattaacaagtggtcttacaaattgaggatgtccactcattcttattgatagagcaccagctatttgtctagctatcatgtatatagtaagtacttttcctgttgtaagtctttttaatttttctattaaagaaacagctctttgttttaaaccatatctttctaatacaccgattactggcagtgttaatatgaataatgatacacctctgtttgagacaaaagaatctcctaaaattgtaaaaatttgattaaaatctaatcctgcaacaattcctgttgccactcctgctaataatacagtaaataatgtgtcaattttaagtataaatccaattacaactatcaatataccgattagttttatcataaattgttctccttccatttctatatgttttaatttaaatttatttaatggataaagttaaactctttttatagtatttgcgttaataggactattattataaaatttaataaaaaatagggaagatgttttaaagtatcaaagtaaataatggttgtgtataggaatttgagtaacaaagattatattttaagctaatatgaattgattttgtaagtctatggtttaagtatatgtcaatatttgaaataggttttaaattagatattatattataaaaagagaatgtgtcaaacatagagacaagtgtatttttctcttttgaaatgataaaaatatatttgatttcatacaaaaagagagtgtctaatgaactttttagttcattagacactctctttttgttatgattaataaagcatatattaagagctagtttcattagatttcactaagaaaaataaaattttgataaagtttaaagactattttgagcaatattacttataaataaaagaatttatcatagaaataattagttttattttagctattaagatttattaaaaaattatctatattatcctgtgatattctaaaactgtcataattaccttttgaaacagccttcataataagtttatctaaaaatttcattttttctaatcgagcttcactaccaaaaattccaatagcatttgcactttctaataaggatgatggaaaatttgattttaaatatttatctgcttgttcagaaaagccacagcaaaggaaaatgccaacttgttttttgtttaataactctacattatcattacatagcacttgtattttttttgaaactgaaccaacatatatagaacttccaataataattttatcaaattttgataactcaattttattattattattaatatcaacaatagtgacattatctgatagtttattttttagtatatttgcacagtcttttgtacaaccatatttacttgaatatataataatagtattcataattattctccctttcttaaagcattttctacagcttttcgtatagtattactgctataagttgcagaagttatagcatccacatctaaagactgttgtttaataatacttgttgtaattttttcagcaggtttacctaaaagatggtcgtgttttaagatattaatattttggattttaccattattaacttcaacagacacagtagcttttaccaagttattatcagcacttccagtataaatgccatttttaacattattaatatctatatcttttactaccaagttttctggctttaagttgcttacaattacaataataatgcatataaatacaaagaatagagcaatagatatttttacatattttttctttttattagtagctttgttgcgaattttcattgtaaagtcctcccactaaaatatctaagaaattttctataagttgagaaaaattatgtaaagaatatagtttattttcaacaacacataaaacgaatcctaacaatgcacttataagcatccatgagcttttatctatattttttttgaatattccttgttcaattccaatggaaaggaatttatcaagcatttttataccattattgctaggagtattgtttgtattttcagatgcaaatataatattcattctactatgcatgatagcttttgccatctctggttcactagaaagagtttttataaagctagtcataatttctatgatttgtttatctattggtagtgatgagcaattattcataatgtcaatagcattactttctactgtgttataaagtttattggtcatatcgctgataatctctgctttgtccttgtagtaaagataaattgtagttggagaatattctatttttgtagcaatttttcttattgataaattttcatatccatgttggtttataatttcgatgctagcatccataatctttttcttcatttcttctttttcatttttacgtctttctttgatactcatataatcacctctttgcttaacggtgttaagttaatttacactgttattgtataatttaattttaatactgtcaataaattattaaataatataagttaatatatttttatggataataaattaatgttattaattgtaatatttaagatattattgtataataataatcggtttaaatgcgccacatcttattaaagttggttcataattctaaataaactttaataagatacattaaaatataataaattcttttatgctataaaatttattttatagctattaaatcagatgtttaaaaattttttaacagtctatagtttttaagagtctatagtaagtagcctaaaaatatgattttacatctgtacttgttcgagaactccaagtataaaaaactaaggaattatatagtggcagtatataattaatacccttagacacacctttttgaaagtggaaaaaagatgtgtagttctcctcgaccacaaatcaaggaggataaaaaatggaaaagagaaaagtaataattgattgtgacccaggaattgatgattctttggcaattcttctggctttaaactcaccagagctagaagtaattggaattaccacatgttgtggaaatgttccagcaaatataggtgcagaaaatgcactaaaaacacttcaaatgtgttcttcactaaatattccagtatatataggagaagaagcaccactaaaaagaaaacttgtaacagctcaagatacacatggagaagatggtattggagaaaacttttatcaaaaggttgtaggagctaaagcaaaaaatggagcagtggattttataataaatactttacataatcatgaaaaagtatcaataatagcacttgcaccacttacaaatatagctaaagcacttattaaagataagaaagcatttgaaaatctcgatgagtttgtatctatgggaggagcatttaggattcatggaaattgctctccagtagcagagtttaattattgggtagacccacatggagcagattatgtttacaagaatttatctaaaaaaatccacatggtaggtttagatgtaactagaaaaattgtacttactcctaatattattgagtttataaatagacttgataagaagatggcaaagtatataactgaaataactagattttatattgatttccattgggaacaggaaggaataattggctgtgtgataaatgaccctctagcagtagcgtactttatagacagaagtatatgtaaaggatttgaatcatatgtagaagttgtagaagatggaatagctatgggtcagtctatagtggattctttcaatttctataaaaaaaatcctaatgcaattgttctaaatgaagttgatgagaagaaatttatgtacatgtttttaaagaggctttttaaaggttatgaagacattatagactctgtggaaggagtgatatagtgtgaaaagaaaaatatgtgtaaaaactattacacttatagcttttggtatttctataaatataataggcgcttttatagctatgggattaagattacctgtatacttagattcaataggaactataatgatagcttcacttttaggacctaaatacgctgttgttacaggtgtgtttggaagtttaataagtggaattacgtttgatgtgtattctctctattttgcaccagttcaaatatcaaccggattacttgctggaatagcatttaaaaagaattttttaaggggtttaaaaactccactaggagtacttttatttgctattccaacatctataataagttcaataatttcagcatttttatttggaggtatgacctcttcaggttcatcctatatagtgcaaatcttgaaagtgttaggactgggagatgtttttagtgtgtttgtaacccaagtatttactgattatggagataagctgttagcagttgttttagtgaatttaggattaaatgcagttccaaaaactttaaaggtatcattgactggaggaaaatagatagaaaatggatagatatagtgagataacaaataaaaatcaaagagaaattgttctgcttaaaggatttccttgtatatggggaaagtgttctttttgtgattatatagatgataattctaatttagaagaagagatgaataaattaaatctaagggttttaaaaaatgtaactgggaaatatggagttcttgaagtcataaattctggaagctgttttgaattacctaaggatactttagaaaaaataaagtgtattataaaagagaagaatataaaaaaattatttttagaaagtcattggtcttacaaaaataggcttaaggaaatgagagagtattttgaaattcctgtggtatttaaaattggagttgaaacctttgacaatgattttagaaataatattttaaataaaaatgcaaattttaagactccacaagatgtaaaagaatattttgattcaccttgtattatgattggaataaaaggacaaacaaaagagatgatagataaagatatagagattatcctaaatacttttgaaaaagcgacagtgaatgtttttataaataattcttctagtataaaaagagatgaagagttagtgaaatggtttgttagtaagtataaattcttggatgaaaatccaaatatagaagttttatacaataatacagactttggtgtaggagattagcattaatttagtttaaatttaaaattgaaaagtttcttatgtttttgaaaaagcttctaatagttagaagctttttttgtagagttttatgttacaataagaaaaaaggaattaaggagcaattaaatgatgtttgataggggaaaatggaataaattggattataatgaacttttagaatatatgatgtctataaaagatataaaatatagagattttaataaaaagcttatacctggaacagaaaatataataggtattagagttcctaatttaagaaagttatcaaaagaaataagccaagggaattggaaggaatttttagaagtagcagaggatacatactatgaagaagttaggctacaaggtatggtaattggcaatataaatagtaattttgaagaaactttatactatgtaaaaagatttatacctaaaatcgataattggtcagtttgcgatgggttttgttctggtttaaagtctatgaaaaaatataaagaaaatatgtatgatatacttaaaaaatatgtttattcaaagaatccatgggaaattagatttgcattagttatgtttttaatatattatgttgatgataaacatattaaagaaatatttgaatactgtaataatatacaaagtgaagaatattatgttaaaatgggtatggcatggttgctatcaatttgttttattaaatgtgaagaggaaacttttctctatataaaaaataataatttagatgatttcacttataataaaatgctacaaaaaataattgaatcaaatagagtagatttagaaaagaagaatataataagaagtatgaaaagaaagacaagaagatgttgacggaggaatattaatgaataacaatgaagacagaattgacaaatttttagaacttcaaagcaaaggatttaaatttgcagagatagctcaaaatctaaagattagtcaaagtactttaagaacttttttaaataaaaaaggatataagtcagaaaaaggtaaatacatattaaaagacgaattaaattataataaaagtttggataatagaaacttggaagaagagaaagctaaggagtatgaaaaaagtaaaaagaatactataagtaatagaaaaaaagtaagcaccaaaaaaaagatttctaatgaaaaggctttaagtaaaagtgttgaacaaattgagtttaatgatacaggtttaaaaaatgcaaagcgaaaacaaaatgttaagcctaagaaagatagaaaaataaatataactcaagaagatttagataagctttgtgaagtatatgattggtatttagaagtaaaagattacaatataaagcctaaaaaagtatctaataaaaaagatgtacatatagatgatgaacacatagatgaattaaaaacaacaagaatacgtatagataaagaaatatggaatgattttgaaagattatgtagtaattcgaattttgaaaaacatcaaatacttacacaggcattgaaagaatttatgaaaaagtataaaaatctactataaaatactactatatgaggtgcttaatatgaataaaatagtaaaaaaatcaatttctctaatgattatattaacaatatttatttttatgttgacagcatgtgaaaaagatgaacagcctgattcagttgatattcaaacagaagataaaaatgagataaaaatagatgagggaaatgcaaaagtattgaatataggaaaatcagaaattataaatatagatgaaggtgataaagtagatacatcaacaaaggtagaaaataattcaacatttaatatatccaatgttgaattgatatataatgaatatgatgagaataaaaaaattatatcttcggatagtaaggctttgttggatatgactttaatgcctgggaaagttgcttacatagaatgtgggcataaaacttttgtaaagggtgtagaagtttatgcatatgaatatgaggcagagggtaagattgtgtatgttaatttaaaagaaaatactattaatataagaaataataatattaagctagaaaatagtagtcagtatgaggtgctatctacatcagaacttaaaaaagtaaatgaatcaaatgagggaattacgtatcaagtaaaagtaaaaaattcatcatcaaaagatttaggaaatattattcttaagacagcagaagttaatgaaaatggagaatatttaacagtaaatcgtgtaccatcatataagattttaaagccttcagaagagacagatatagatatattgtgttcaacaaaggcaaaaagtgttgaaatagtgggatatacgtatgatgatataaaagaaaaagccaatgtggatattgacttaaaatctcataaagttaagatagacaaataaaggtaggggatacttatgaaggttttaatagttgaagataataagatacttttagaaagtgtagtagaagaacttagcaagcattttgaaactgaaaagtgtgaagatggagaagaagctttatacttagtaaatcaaaatatatatgatttagttattttagacttaatgcttcctaatataaatggatttgatatcctaaagaaaatgagagttaataatatagatacacctgtacttatattgacagcaaaagaaacattagatgacaaagtagaagcatttactataggagctaatgattatttgacaaaacctttttatatggaagagttagtagctagggtatacgctatattaaggactaatggaaagataaaagaaagaaacggattagaatttaaatctttatatttagatacactagaaaaaagagtgtatattgaaaaagaagaaataaaacttcaaaacaaacagtttaacttgcttgagtattttgtattaaataaaggttcaattttattaaaagagcagatttatgatagaatatggggaattgattcagatgcaactattgaaatagtggaagtatatgtaagtaatctaagaaaaaagctaagtaaatatggatatgataaatatattaaaactaaacgtaaggtaggatatatattcgatgataaataagaatgtatttaccagtactaaaaatcatttaataaaaatgtatattattgtagtaggtagttttttaataatcttttctatatttatatactcatattttaggggacttacatatagtggaattgatagtgagataaatgatgaacttgaatatatagtctctcaatttaaaagaacttcatttttgaacccaataagactgaaagatcctaaagatatggtgtatgtatatgaagatggaaggataagttactatactcaaaatgaatattttgatgagttacttccagatagaagactagataaaaaaaattcgttttttaaatacacagaaaatggatatacttttagagaattaaatgtagatgtaggtagataccaaatacagataattagaaatatagattctgagatgaattctttaagacagcttacatctgttcttataattggaatattaatttctgtaataattacttactttgtggctgtatatctcactagaaaagctttaattccaatagaaacagcatggaaaaatcaagctaagtttatacaagatgcttctcatgaattaagaacaccaataacaatagtttcatcaaaattagaaagtatgttaaaatccccagaaagtacagtaaatgatgaagttgaaacaatagctactgcaatgaaggaaactagaagacttaaaaaaatgataactgatttattgtctcttactaaagaggactctattgttaaagttaatttagaagaaatagacttagaaaaattattggaagaaatatcagaagactatattgacattgctgagtttcaggaaaaaagattcgtgtttaattctaaactgaagaataaagttataataacagataaaaataaattaagacagcttatattaattttcattgataatgcctttaaatatacaaaattgggtgatgagatagcattagaattaaaagaagatatagaggatgaggtaactttacttataagtgacactggtataggcataaaaaaagaagagatacctcttatatttgatagattttttagaagtgaaaatgtaagaaataaagatttagaaggttctggaataggactttcaatagctcgcatgattagtttaaacttatctattgatataaatgtaacttctgatgtagatattggaactacatttgaattgtcaataccaaaaaagttaaaataataaaaatataaaaaattgtttttagaaatgaagaatgggtatactaattagtataaaatataaaaagaccttataaaagtaaatttatatttataaatttcatagtataattatatagggataataaagtttaataggaggatttaaaaatggcaaaagttataaatacatctgaatttagaagtagtgttgaaggtagtaagggagtagttgtagttgatttctttgcaacttggtgtggaccttgtaacatgttgggacctgtatttgcagaattaggtgaagagatgaaggataaagctagatttgtaaaagttgatatagatgagagcttagaaatagctcaacaattcaatgtatctacagtaccaactatgattatatttaaagatggaaaaccagtagaaactttaattggattcatgccaaagaacaaaattgaaatgcaagtaaaatcatatttataaaaaatgggtgagtattatgagatatgatatagctataatcggcagtggtccagctggattgtctgctgctataaatgcaaaaataagaaataaaacaattatcatgtttggtaatgataatttaagtaataagcttgttaaagctccttcaatagataattatttaggtttttatgatataagtggtgatgaattaaaagacaagtttaaatcacatatagatagtatggatatttcaattgaaaataaaagaataaataatatttatgctatgggagaatactttacaataatgtctggaaatgatatgtatgaagctactactgtaatccttgcaactggggtagagtatactagaccaatcaagggtgaagaagaatttctaggaagaggtgtaggctactgtgctacatgtgatgcaccactttatagaaataaaaaggtagcagttataggatataatgaagaatctaaagaagaagcaaattttttaagtgaactcacttcaaagacttattttatacctatgtacaaaaaagataatcttatgagaagttcagataacctagatgattctattgaagttatacatgacagaccagtacagatagatggagataaacttgtaaacaaagtatcttttaaagaaaaccacattgaagttgatggagtattcgttataaaagatagtacggctccaagtgcattggttcctggaatagagattgatggcattcatattaaagttgacaataatatgaagactagtatagatggatgctttgctgctggagattgtgttggaaaaccctattcttatataaaagcagctggtcaagggcaaatagcagctttaaatgctgtttactatttagataaattaaagagggcttaatatttatattgattaactttttaaagatatttataaaaaactgtcttgaaataattttattatttcaagacagttttttatttttaagttattaataaaagtattttaaaatctatatgtaattacttttattaataaaattcaaagttatattagtagaaattggaattatttataatatactccaaaatttaaaaataatggttgaaaaatctaattaagagtactataatttaattaagtaattacttaatcaaaacgaggtacttatggaaaacttggttaaaatatttaaagcattgagtgatgaaactagacttaacatacttatattagtatccaagagaaatatatgtcaaaaggggatttctaaatatctagggatttcagattctgctgtttcacaacatataaaaatattaaaagatgttgggataataacaggatataaagaaggatactatgttttatatcatattaataaagaatcatttaatatatgtgtagattttataaattctatgttaagtaattctagtgaaagctttatagatgtatttgatgtaaatacaatacatctaggatgcagtaaagaatgtaaatctataaaaaaatgttgtaagagaagggagaaataataatgaaagtatgtataccagtagaggagaataaaggattggatagtaaaccatatggacattttggttctgctccaatttttgttgtgtgtgatttagaaagtggagaagttaaatctttagataatggagatttagatcatgaacatggaaaatgtcaaccattaaaagcattgtcagggacagctgtagatgcagtagttgttggaggaataggacaaggagctataattaaattaaatggaatgggaataaaagtttacagagcagaaggtgatactataagtgctaatttagacttacttaaaaatggaaaattagtagagtttccatcagaccatacttgctcacatgacggatgtggacatcattaaaaaaaacagctgatgaaatatatacttcatcagctattttttcttttaataaatacgattttattcttttaaaaccaaaatttagatttttatgttttttgtagtatccttaataatatttcaagtttacaagtttactacttttagattttttttgtatgtttttctatatagtcaatatcatttaatatgtcattgagttctttattaagtgtttttaaatcatcaccatctacattgtagtttaaaaatagttcctctacattatcaatgatagaattgacttttctagtaacttcaacaaatgtcttaaagttactactatttttagcatttagaaatttttttaaatcctttgatataaatgatactatttcatattcatcattaaatagacctctaccaataggatatggttcaattctctgtaaaaaatattggtctttagcattaatattataagtataagatatttcccaaccgtctcctaaatcaaacttgataaaatataatgtactacttacttttgatattcttgtggcaccaagctgtcttaaaagaacttcaatcgaatcaccttgaacagtattaatattcatatatacacatcccctttagtattattatactatattttttaaaattttataattaaataaacagtagatataataatagatataatcataagtggaaaacctattttgaaatactccttaaaagagataggatgaccgtgtttattacctatacctgctagtacaacattagcagatgctcctattagtgttccatttcctccaagacaagctccaagagatgttgcccaccatagtggcattacatcaataccttcagcttgcatagtcaaaataagaggaattagtgttgcaacaaatggaatattatctaagaaagaagagactatagctgataaccataatatcaacaacattgtaaatacaagatgtccttctgtaagtccaatcaatgcttgagccaatttgtttattatcccaacttctactagtccaccaactactacaaataatcccataaagaataaaattgtggaccattcaatacctgccataatttcatctacatcttgttttcctattaaaagcattatagatgctcctgtcagtgctacaacagaagaatctatgtggattgtactgtgaaacataaaaccaaaaagtatgaatgctattaatataaggctttttataagtagaggtttatctttaacagattttttttcatctagttttaatattgcatttttagctctttcattcacaacaagttcttttccataaataaatctaaagcatattatagttatagcaagtattactataacagcaggacctaaatttattacaaaatccataaaactaagattggcagcactaccaatcataatatttggagggtctcctataagagtagctgttcctcctatatttgaagctaaaatctgtgttattaaaaatggaactggattaagtcctaatatttgtgtaataactatagtcattggtccaataagtaagacggttgtaacattatctaatacagctgataaaatagctgttataatagcaaaacaaatcattatcttccatgggtcacctttagctttctttgcagtccagatagctatatattcaaataaccctgagtttttgacaacagctacaaatagcatcataccaactaatacaccaatagtattgaaatctatatggcttaatccttcatcaagtgtaagtatattgaatattatcattaatagtgcaccaccaacagctgctacggatctgtttaccttttctgtaataatagctgccataactattaaaaatatacatatagctattatttgttgaaattccataatataagtacctccatttgtattattttgtgcctaatgctagtactatatatagtattacttttttattgttttttcaatggatgtatgaaagtatattatttaacaaagtttttgagaaattgacagaatttaaagaaaatttttgttatttaaataaattttaaaattattccattgataataatattaaacgacaaacgaaaaaatataccctttaaactagaatttattgtatccaataacaattataaaatattaaatatatctatattataaaaataataaaaaaaggtttgatttgaatataaaactgcaatatattaaaaaaattattcattttaaaccttgtaatttgattttataaatattataattaaattaatgaatttttaacaaggaattattcatttttttgattttaagatttattgagaaaacaaaactaaataggggggtaattaatataatgaattttttaaatggtattttaacgagtattaacaatgcagtagtatttgtaaacaattacttatggtcgtatatcttaattataatgttagttgtaattggtatttactttactattaaaacaaattttgtacaattcagatattttatagaaatgtttagacttctgggtgatggtacagcgaataaaaatgcaaaaaaggaaggaaaaatctcttcatttcaagcattttgtataagtacatcttcaagagttggaactggaaatatagctggaatagcaattgcagtggtagcagggggacctggtgctgtattttggatgtggcttatagcattaattggttctgcatcaagctttgttgagagtacattagctcagatttacaaagtgaaagatggtcaagcttttagaggtggaccagcgtattatatggaacaaggtctaaataaaaaatggatgggtattttattctcaatacttataactatatgttatggttttgtatttaatgcagttcaagcaaatactgtttcacttgcatttaataatgcatttggaataagtaaaatggctatgggaataggtcttggaattttaactgcaatagttatttttggtggagtgcatagagttgcaaaagtttctgaaataatagttcctgtatttgcaggattatatatattagttgctttggctatagttgtaatgaatataacagagataccaagtgttatagcattgatagttgaaagtgcatttgattttaaaggaatggcgattggtacatttatgggagttgtaatgactggagtgaagagaggtctattttctaatgaagcaggtatgggtagtgctcctaatgctgctgcaacagcacatgtaactcatcctgtaaaacaaggtttaattcaatctttaggtgtttttacagatactataataatatgtagttgtacagcattcatggtattattatattcaggttatagtagtagtggagcaactggaattgaattagctcaagaagctttaactcatcatataggaccagttggaaatatatttatagcagtttgtatattcttgtttgcatttagttctatagttggtaattactattatggtgaatcaaatatggagtttatgagtggaagtaagactaaacttaatgtatttagagtttttgttgtaggcatggttttatttggttcacttactcaagtagatgtagtttggaatcttgcagacttatttatggcattgatggcgataataaacttaatagcaatagcacttttaggaaaatatgcatttattgctttaaaagattatacaagtcaaaaaaaatcaggaataaaagaccctgtgtttattgcagatgaaatagaaggcctagaaaaggtatcagagtggcatagggaattatctgaggaacatttaggataaaaaatagtataaaattataaaaccattttgaaagactagagtatgtatatgctttatatgaatataatattgaattaatttatattactggaatttttaattccagtaatatttttttattatataatttagctttattaaaagtttttattattaaaaatagcttatttatcgtaaagtgaatgatattggttttttaattattatgaatgttggtatttaatttaaagacttaaataaatttgccatttctagcgcattcatagcacaatcataacctttatttccagcttttgtacctgctctttcaatagcttgttcaatattttctgtagttacgattccaaatataacaggtaattcactgtctaaagatacttttgctatccctttagagacttcactacatacataatcataatgagaagtagcccctcttataacacagcctaaacagattatagcatcatacctaccacttttagccattttttgagcaacaagaggaatctcaaaagctccaggtacccaaactatttctatattttctggagaaacgtcatgtcttaaaagacagtcttcagctcctgataaaagttttgatgttataaattcattaaaacgagaatttattatacctatttttaaatcttttccaataagttttccttcatatatcatttttatttcctccaattttatttatgttatagatttatatttataaatatctttaattttaattataaaaaactacttagtagaaaaatatcatcatataatcatttatataatatctaaaagatgtcccattttatcttttttagtttttaaatatagcttattaaagtcattaatttcttcattaatagggattctattttcgatttttattccatatttctctaattgatttattttatccgggttattacttaaaagatttatactttttatgtttaaattttttaatatttgagcagccatatagaaatctctcatatcttcttcaaatccaagcattaaatttgcttcaacagtatcgtaaccttcttcttgaagtttataagccttaattttatttaaaaggccaatacctctaccttcttgcttcatataaattaaaactccacttccattttccacaattttcttcatagaagattctagctgtaatccacaatcacattttagagagtggaacacatctcctgttaaacattcagaatgaagtctaactagagtattttctatatttatatttccataagtaagggcaatgtgttcttcatttgaataagtatctctatatcctatgatttcaaaatttccatattttgttggaaggaaagcactagatactttttctatagtagtttcatttattttgcggtattctataaggtcttttatagtgatgatttttaaattatgcttttctttgaaaatcattaaatcatcaactcttgccattgtaccatcatctttcattatttcacagataagaccaatctctttaaaacctgcaagtctagcaaggtctactgaggcttctgtatgtccatccctgacaagaactccaccagtttttgctattaaaggaaatatgtgaccaggcgttttgaaatctttacttgtagaattttcatcacagaacaattttacagtttcagctctttcatatgcagatataccagttagagtatctgctccatctatagtaacagtaaaggctgtttgaaatgtatctgtattttctctaaccataagaggtatattaagacttttaaattttttttcagtggcaggtagacaaattagacctctaccatatgtagccataaaatttattgattcaggagtagccatttcagctgccatcaataaatctccttcattctctctactttcatcatcaactacgattaccattttcccattttttatatcttcaatagcttcttcaatagtattaaacatgtaattcactcctttattatttttaaaaaccatttttaaataaaaaatctttatctatatttgatttatggttactactattagaatttaattccttgtagttattagccataaaattattaacatactttccaattacatcgctttctaaattaacaaaatctccaacattctttgtcaagagaatagtgttaattttagtatgaggtataatagaaaccttaaatatttcatcatctaaatatgatatagttaaacttacaccatcaatagcaacagaacctttgagtatcattgaagataaaagttttttatcaggtcgtatacttactaaaactgcattttcatctttttcaaatttgcagatagttcctttaccatcaacatgacctgttactatatgaccaccaaatcttgaagaaagactcatagctctttcaagatttaccttatcatttgcatttaataaacctaaatttgtggaacgaattgtctccatcataacatcggctgtaaattcattttttccgaggtttgaaacagttagacaaactccatttacggctatactatctccaagatttgtgccatctaatattttatttgatagtatggttacttttccactcttaccattagcagtaatttttctaagtattccaacttcttctactatgccagtaaacatcctaacctcctatatgaatgtattaacaaaaatttaatttaaaacatctgattctataagaatatcgccatctatcaaagttacattattgattgttaactgtgttgaatctgacaaatgatttattccttctccagaaacgaatgtaggtgcatctttaccacctataatcttgggtgatagaaataatttgactttatcaactaacttatttctaaagagactgtcattgagagtagcaccaccttcaactagaacagaatcaatgtttaactctcctaatttatacattacaaattccaaatctactaagttgttttttgaaggagaaattattgtttcaacattattttcttttaacatagataattttatactttctttgcaacatgtgaaaactatagttttactggttttatctttaaccaaattactattaagtggcaactttaggtgtgtatctattactattcttgtaggatgagacactttttcttgattgagcctgcaagttagtaaaggattatcgttcaaaactgtatttatgccaaccattatactttggtatttatttctgtatttatgagttagataccttgatgattcattagatatccattttgattctagtgattttgtagcaattttaccatctagacttactgctgattttacaatacaaagaggtcttttgttttttatatgataaaaaaatgcctcatttaaatctcttgcttcatcttctaatattcccacagtaacatcaatattgttatcttttaatttttttactccattaccacaaacaagtggatttgggtctaatgtagatattacaactctcttaatcttattttgtataattttatctacacaaggaggcgttttcccataatgagaacatggttctaagtttacataaagagtagagtcttttagactttgtttagcactgtttatagcatttacttcagcatgattagagccaaatttctcatgatatcctttgcctattatattactatctttaacaattacacacccaactaatggatttggatttacaaagccttctccatttttagccaattcaatagcttttttcatataataaatatctttttctttttgattcacaatatgtacacctcctgtttaattggataatttttaaacaaaaaaccctgagaattaactcagggtttagaataatctacaataaatgtttaataaaagtagaagaaaattgctctacaaaaacactcattaaatatcttcttccatccagactttactgtcggctttggaatttaaccaaatcaaccaagttttaccttggctcgcgggctataccgccgattgggaatttcaccctaccccgaagattaagtattaaatttatatttagaatgtatcataaattattttactttgcaaactatttttttaaaaaatatatgttaatatataatatagaatgtctataaactttgaaataccacgattgtgaatataaaaataaaaatttgaacataatcaggaaagaagtctaattaatttaaattaggagagtaatatatgaataaaaaacttttagaaatactatcaaaatactatggatatacaagttttagaaaaggtcaggaatctataataaattctatcttaagcgaaaaagatgtgttagctattatgccaacaggaggggggaaatcaatatgttatcaaattccagctttgattttagatggaatgacaatagtaatttctccacttatatcacttatgaaagaccaagtagatgccttaaagactatgggaattagtgctgcttttataaatagttcattaagcagcaaagaatttaatgaaatattaaataatattagaaaaaataattataaaatactctatattgctccagagagattagatgcacaagagtttattgagctaataaataataacaatgtaagtcaagttgcgatagatgaagcacattgtgtatctcaatgggggcatgattttaggttgagttatagaaggatttctgattttataaaaaatttgcctaaaagacctatagttacagcatttactgcaacagcttcagaagaggtaagaactgatataataaatttactgtgtttagaaaatccagattattatataactggatttgatagagagaatttatcaataaatatagtaaaatcatctagtaaaaataagtatattttagattatattcaaaatcataaaaatgagtctggaattatatatgttgcaactagaaaggaagttgaaaatatatataatggtttatctaagagaaatatatctgtatcaaaatatcatgcaggtttatctaaaaatgaaagaagtaaaaatcaagaagattttataaatgataatgtggatataatggtagcaacaaatgcatttggaatgggtattgataaacctaatataagatgggttatacattacaatatgcctcaaagtatagaaaactactatcaagaaataggtagagctggtagggatggagaaaaaagtgagtgtgtacttttattttctccaggagatgtacatatacaaaaatatttaattgatattggagttgaaaatcctgaaagaaaattatttcagcataagaagcttcaatacatgattgacttagtttacagtaattcatgctatagaaagacaatattgagttattttggagaaaattatatagacaattgcaataattgtagcaattgtttagtagagggtgaaatagtagataaaactatagatgcacaaaaagtcatttcatgtgtagctagaatgaaaagaagttatggtgttactactattgtagatgtacttagaggttctaagaataaaaagattttacagcttggattaaatactttgtctacatataacattatgagagattattctagtgaagacttaaagaattttgtaaatacattggtttctcatggttttttagatttagttgagactctaggcaatggaaatagaggtagttttcctactataagattaaatgagatgtctatgaaagttttaaaaggtgaagtgaaagtagagtttaaagaaattgttatgacaaaatcattggaagtagaggatgagttatataatgctttaagagaacttagacattcaattgcaagtgaagaaaggatagctccatatatggtatttggagatggtacacttagagccatgtctagtagttatccaattaataaagaagaaatgctagatatctctggagtaggagaaattaaatatcaaaaatatggtagagattttgaagcagtaattaaagaatatgtcgaaaaaaataatataaataaaaaaatagatgaaaaaaatgtcgatttaaagaacgttaatagtgatttcttagaggttaatacagataaagttttatatgaaaaactgttagtcattagagaagaatatgcaacaaaggaaaaattacctgcatatatgattttagccaataaggctttgaaagaaataagtggaagatatccacttgatgaagaacaattaaaagatatttctggcataggtggagtaaaatttgaaaaatatggagctaatattttggcagaggttaataaatatgtaaaagaaaataatattaatgttatttgggagaaaaagggcaaaaggaagttaatattagatggagaaagtagaaaaaataatgaaatagcattagatttgctaaatcaaggaaaagatatacaaagtatcagtcaagaaatagaagtttcattgtcaaccattattggatatgtgcatgactatgtaaaggatggacatagtatatcatttgaattaggactagaaaatttttataatgaagataaaaagaagatgattttagaagtttgcgaaaaagttggctatgataatttaaataacataaaaagaaaacttccagattcaataaagtatgaaaatataagagctgtgatgcttgactcttatcttgaaaacttaaaaaataatattatagcagagtaatttttaacttaataaaaataaaatttgtattattgtgttgaactaataattttgctgtgttatactgaatttgtaaaaataatgaaaaattagagctaggggcgctagaattggctagctgagagataaagccgtaacttacaaaccctaataacctgatcaagataatgcttgcgaagggaagctttttaatataattttattatataaataggcaaattattcaatgttaggagaaatttgtctaagtgtatatacgattataagagtgctttccaaacgaggaaaagcactttttttattttcaaaaactataactttaatcttggaggattgtaatatgaactatacaacacaaatggatgctgctagaaaaggcataataactaaagaaatggaaatcgtttctcaaaaagaacaggtagatgtaaatgaattaagagaattaatagcaaatggacaagttgttataccagctaataaaaatcataaatctttaagtgcagaaggtgtaggtaaaaatttaagaacaaaaataaatgtaaatctaggaatttcaagagattgtaaggatatagaaaaagaacttgaaaaagttagagtagcaatagacatgaaagctgaagctataatggatttaagtaattatggcaaaactagagaatttagagaaaaggttgttgaaatgtcacctgcaatgataggttcagtacctatgtatgatgcagtaggatatttggaaaaagaattaaaagatataacagaagaagagtttttaaatgtaataagacaacatgctattgatggagtagactttattactatacatgcaggtcttacaagaagtgtttgccaaaaaataaaaaatcatgagagattgactcatatagtatctcgtggaggttctttattgtttgcatggatggaattaaataataaggaaaatcctatttatactaattttgataaaatattggatatatgtgaagaatatgatgttacattgagtttaggagatgcttgtagaccaggttgtataaaagattctactgatggtgttcaaattcaagaacttgtagtattaggtgaacttactaaaagagcatgggaaagaaatgtacaagtaatgatagaaggtcctggacacatggctattgatgaaatagaagcaaatgtagtattagaaaagagattatgccatggagcacctttttatgttcttggaccattggttacagatatagcaccaggttatgaccatataacaagtgcaataggaggagctttagcatgtgctaaaggagtagattttttatgttatgtaactccagcagaacatttaagattgcctaatttagatgatatgaaagagggtataatagctgcaaagatagctgctcatgcaggagatatagctaaaaatgttaaaggtgctcgtgaatgggataataagatgagtaaagctagagctgatttagactggtgtgagatgtttagacttgcaatagaccctgaaaaagctaagagatacagagatgaatcaactcctactcatgaggatagttgtactatgtgtggaaaaatgtgctcaatgagaacagttaagaaaatattaaacaatgaggaacttaatctaatataatttttggctagtatgactggaataaaaagaagctgaaaagaggaggtgatttagtgaaggttaatgggaaggaaattgaatttgaaaaagatttgactgttatagatttattaaataaatataatttaaaaagtgatagagttgtagttgaagtgaatttagagataattgaagaatctaactacaatacatatgtattaaaagacgaggacattgtagagcttattagctttattggaggtggttaaaataaaaatatttgtaaatgaattattaacagatgttgaggaaaatacaactgcttataaagttagagatagctataacaataaatgtgatgtattggtgttaaatggatatccaattaaaacagatatgcccctttgtgaaaatgataaattaacacttatacaaaaaggagttaagccatcacttgatgaattggaaagcttgttgattgctagacatactccaaatatacataataaattaaaaaaagggaaagttgctatattgggattggggggacttggttccaatatagctatctctttagctagaataggagtgggagaacttttacttatagattatgatgttgtagaaccatctaatttaaatagacaacagtattttatagatgatataggaaaactaaaaactgatgccatgatagaaaatataaaaaaaataaatccatttataaaattaaataaacgagatatttttttaaacaagaacaatatggatactattaaggattcagatttaataattgaggcctttgatgatgcttcatgtaaagcacaggtatgtaattatgtattaataaatttaaaagataaatatttaatagcatcatctggtatggcaggttactatgattcaaatataataactactaagaagataaaagacaggttttatatatgtggggattttgtgaatgaagctaaatttggtgaagggcttatggctccaagggttgccatctgcgcaaatcatatggcaaatttggcaacgcaaatacttatagatatgtaaatattaaaattagatataaaaaagattgaatattaaaaaaatttaacgtggagggaaataatatggataaattggtacttggtggacatgaatttaatagcagattattggttggaacaggtaaatatggttcaaataatatattgcctgaggtaataaaagaaagtggaagtgaaataataacaatggcacttagaagagtggatttagacaataaacaagaaaacatattaacgtatattccaaaagagatgacaatacttccaaatacatcaggagctactaatgcagaagaagctgtaagaatagctagaatatctagaaaaatgggatgtggagattttataaaaatagaagtaatatcagatactagatatttacttcctgataatgaagaaactataaaagctacaaagatacttgctgatgaggggtttatagttcttccatatatgacaccagacctttatgctggaagaagacttatagaagctaatgcagccgcagttatgccacttggagctccaattggttcaaatagaggtcttcaaatgaaagaaatgataagaataatgatagatgagttggatataccaataatagtagatgcaggtattggaaaaccatctcaagctatggaggctatggaaatgggagctgatgcagtacttgtcaacactgctatagcttcagcaggagaccctgtacaaatggctagagcatttaaattagctgtagaaggtggaagagaagcatatattgcaaaaacaggaaatgtgtcagaatttgcaaatgcatcttctcctttaacaggttttttaggcaatttatagaaagtggtgattggtgatgagtttttatgatgtaatagaaaaatatagggattttgattttgatggatatttaaataatgttactgataatgatgttttaagaagtttatcaaaagacaagcttgaagattttgatatattaaatttgctttctaaaactgcagtaaaacatttagaagatatggcacaaaaagcacataaattaagtgttcaatactttggtaaaacagtatgtttatatacaccaatgtatatagcaaattattgtgttaatcaatgtgtttattgtagctataatataaagagtggaataaaaagaaaaaaattaactatggatgaaattagagaagagggagaagcaatttcaaaagaaggtttcaaacatctacttgttttgactggagaaagtagttttcactcaagtgtagaatatataggtgaggctatagaaatattaagagagaaatttccctctataggtatagaagtttatccaatggaagtagaagaatataagtacattgtagataaaggtgttgaaggattaacagtatatcaagaaacttatgacgaggaaatatataagagagtacatataaaaggcccaaaatcaaattatgaatttagactagatgctcctgaaagaggggcaaaagcaggtatgaggactttatcaataggtgcacttttaggtctaaatgattttagaaaagaaactttttttacaatattgcatgggaaatacttaaaaacgaaatatcctcatattgagctttcatattcaacaccaagaatgagaccttttaaagggtgttttgaggaattggtagatataagtgatactgatttagttcaagctatggtatgtatgagattatttgaccctcatgcagctataaatatatccactagagaaaatttagaaatgagaagtcatataatacctttaggagtaactaaattgagcgcaggtgtatctactgatgtaggaggtcattctcaagatgaacatgatactgctcaatttaagataaatgatgaaagtactgttaaagatgtggagaaaatgctaaactcaattggttatcagcatgtgtttaaagattgggaaagattttaaatgtatctgataacaaacagaaaattatgtagtgaggaacgatatttagaagttattaaagagtctatattgagtggtgtagaaaatataataataagagaaaaggatttggaatatcaagagctaagaaaattatatatgaaaataaaaactaaaatcaattgtatagattttcaagagcaaatatcagatgaaagtttgaaaactaatataaatcaaaaagagtgtagaaataaattcaaggttaattttataataaatagtaacattgaattttttgaaaaagtggattgtcaaggtatccatcttccttttaaattattcttgaatttaattgaaaataagtataattttaatgaaaataaaatactaggattatctttacataaagtagaggaagtagattatttagaaaaattaataagaaatcaaaatataaaaatagattacataacattatcacatatatatgaaactaaatgtaaagaaggattaaatccaaaaggaattgagcttttaaaagaagctaaaaagattactgatattaaaataattgcacttgggggaattttaccatctaatgtcaaagaaacattaaaatactgcgatgattttgctataatgtcaactataatgaggtctaaagatattaaaaaaaccatatcaaattataatgaaaagttgaattagtaaatatagtatattgaatttttaacttaaataaaaataaaaaagttatcttttaaattttaaaaggtagcttttttattttatatctttgctaataaaaaattgtaaaaagggaaaactttagtcagagagattaaacaatatcctagaaagatttaaaatttagtaaagtatggaggacattataatgactgacagtaaaaagaaacgatttattataccacacacttttacaataatatttttactaatagtcttgatggcaatattgacttggatagtaccaagtggtgaatttagtagagaagatgtagaaggtagaatggtagttgtaccagggacttatcaaagtgtagaaagtaatcctcaaggatttgcagatgtttttaaagcaccaatagaaggctttatagattcagctgaagttgtaggttttgttttaatagttggaggtgcttttggtattgtaaataggactggagctatagaagcaggaatagcttcggttatctctaagtttaagggaaaagaacttcttataattccaatatcaatgattttatttggacttggaggtacaacatttgggatggcagaagagacattaccattttatatgatatttgttccactcatgacatccttgggatatgattctctaacagcaatagcaattgtatttataggagcagcagcaggagccgccgcttcaacaataaatccattttcagttggtattgcacaggcactagctcaacttgctcctggttcaggagtaacttacagagtagttatttttatagcatatatactaataagtatagcatttgttatgtactatgctaagaaggtaaaggaaaatcctgaaagttcaatagtatatgaaatagataaaaataataaatcaatacttaatcaaacttcaacagaaataaaagaatttacttttaaagaagtatctgttcttgctatatttggaatagggatggcaataatgatttggggtgttttaagtcaaggatggtacattccagaaatatcaatgtgttttgctgcaataggtgtgctttctggattggttggtagattatctcaaattgaaatctcagaaagttttatagatggagcaaaagatttagcatctgcagctcttgctatagctttggctcgtggaatcgtaataattgctcaaaatggatttataatagatactatattaaattccgcagcagcctttctaggtgggcttccaaaggttatatttgtatatttatcatttttcttggaagctgcattggcatttttaattccatcatcttcaggtcttgcttcacttacagtacctgtacttgctcctcttggtgatttggttaatatatcggctcaagtgatagtaaccgcttatcaatttggtgtgggtcttacaaactttataactccaacttcaggagtactgatgggagcacttgcagtagcccatattccattttcaaaatgggtaagatttataatgcctatcttgttgattttgacagctgtatctctagtctttttaacaataggtatttatatagggttttaattaagtgtagttttatttaagatatttagtaatggtataaaatgataatatgttttcaataaattgccactaatttaattagtggtaatttattttttgtatttaaaaataaatgtatttacttgtattttgaattaatatctacttagacattgttttaattgttatattttcatttaattaagcattgatttatcgttttttatatttcatataacaatgcaaaaaataatttttatatagtaaatgacaaaagtttacaataaatgtatattttcttactcattccttaaaattactcatttagtttaataactctcatttcatatgtaaagttggtaaaaaaattaaaattaaaagtaaaaaactaaataaattaatgttaatttgaaatatatatgaaggtttttggagaatacttacttatgataggaaaaaatgttaaaataatagtgtaatcaaatataaaggactgaaataattaacagttattaaatattaggagtgtaaaaatttatgggattaaaagaatttgattttattgaagagtctattgatatgttgaggacaatgtcaccaacattagaaactatatcagatgaaatagaagagtattttgaaaatatcttggatgaaaagaatcaagaatatataaatgtaacctctagaataaaatcagaatcaagtttaagagaaaagataattagaaatagatatttaaaaaaatatggagaagcaagtaatcttattcataatgtttctgacttaataggcctaagaattgagtgtagatttattgaggatgaaaacaaaatatatagacttttgagaagatattttaataaaacagatgacaaaataaactattataataaagagaataagaatattaaattaaaactatctgagaggcaacccaataagcaaaaaaatggatttgaaatatataaaatagatggagtttttgcgtatttagatagagaagtaaaatttgaacttcaaattaaatctcttgtaaatgtgttttggagtgaaatagaacataaaataatttataaaaataatacatatttacttgctgataaatttataaaggatatgatggactctataaagaataatcttactatgatagataatcagcttttaagtatttataaaaactttcattcagggaagtcttttaatatgaaagtaagtaaaaaagaaattgaaaaattatttgcgaaactagtctatgacgctttttctgaaaagatgaataaaagtataggttttgttgtagattttaaaaaaccatgtgaaactatattgaactattcttttaataaacaagatataagtgatgaagttttaggtaattttatgcttgatgagtttgcaagattaaatgaaattgtaaacaaggatatagattttaatgagcaaatagaatttgaaagagaaccaacatttgatgataagttttgtaaagacctaggaaatcattttagaagtagattaaacacagaatttccatggaacctattttttagaatattatttgaaatagagccatataacaataccaaagactttgaaaactttgtagagtttataaaagaaaatgtgctactagaagaaaatagggagcaattattatgccaatttgaagaagatagcaagcttataattgaagatatatatgattgtatatttaatagtataagtgagattgatagtgttgaaattttatataactataatcttgaaaaaataaactttacatcaagtgaaatcataaattgtatatgtagagaatatgagtgttatggtgaatacttagaagaaaaagaaaagcttatgaatacatttaaagaaaagattattcaaatctttgagtaataggtcaatgctgaagtggcgctaatgcgccatttttcaaatatatatgaattaagtaaaattattttggaggaggcgatttgtatagagaaaacaggtgtaattttggcagggggaaaaaattctagaatgggtagagataaagcctttttagagttacatgataagctttttattgaaattgcaatagaagcatttaaaaactttgatgagttgataataatatctaataatgaagaattatattctaaatacgatattaaagtttataatgatatagtaaaagatgttggtccaattggaggaatatatactgctcttgaatatgcaaagtatgatatagttacaattgcatgtgatatgccatatctaaataatcaaatagtcgaaagaatagctaataaaatgaatgataaaagtgtgatttcagtgacaaatggaaagttacaaccattgtgttctggatataaaaagagtataataaataaagtatctttatgtataagggaaaatgatttaaagctcagaagctttatagataaaatagataaaagttatatatactttgatgaagaagatttatttttaaatgtaaacactgttgatgagtatgaaaaattaactaaagtttaattagctatggttgtaaaatagagtaggatttatatggaggagagtttatgaatttacttaaatgcgattcttgggcagtaatattaaataatagcgataaagaaagtaaagcatataaaatattagatgaacttaaaaggaatatgtacaaagttgttgctatagatgaagagaaaaaacctattgaaggaatagatgtgtatgaatgtttaaaagatgttccacacaatattgatgttgtagctattattgataaacaatctaagatggatgtgattttagaagaagtagagcttttggatatacaaaatatgtggtttgaaaaaggaagctttagtgaaatgatgattaaaaagactaaagatttaaaattaaatatagaatataatttaagtttatatgatgagttgactagataaaattatatttcttaataataaaaatataattagttaataaaacatattattttatagtatagattggttaataaaagtacagattggttaatgaaacattaaattacaatatttgttaaaagaattgtgagttacatgatataatgtattaaataggatactaaggagttgatatattatgttaatagtaactacagaaaaagtagaaggtaaaaagatatcaaaggttttaggattagtgagaggaagtacaataagagcaaaacatgttggaaaagatataggagcaagttttaagaatcttgttggaggagaacttactggatataatgaaatgctcactgaagcaagacaaattgccataggtagaatggttgaagatgcagaagctaaaggtgcaaacgcagtaatagcatttagactgtcttcagcttcagttatgcaaggggcagcagaaatgcttgcttatggaacagcagttgttttagaagatgataatagtattcttgaaaaataaaatataaatagttaaaaagaggcatcttttaaaaattttatggatgcctttttttatttgaaaaaactaatttgagaagaaattttaactattatgacaataaaattagggtgatattatataaataagtaaaattatattatataatgtatggtatagactttaaaaattttatttgtagagaaaaatatggacaatgttataataattatagaaattaaaagtacttacattcattatgtatgtgacatgtataattagttttatatttaatacagttttgaagtaatatcttcattttgagaacgttggaataataaaaaatgtatgtattataggtgatataaataaaaaataaatataatatgttatattgctgatagaaaagagaataaaagaaaataggttttattaaaagagatttttatttataggacttaatcaatgtatagaggggtgagaacatatgtttaatgttgcaattataacacttagtgataaaggatatgaaggaaaaagagaagatataacaggaaaaaagttaactgaatttgttgaaaatacaggagcttataaagttactgagtatgtacttataaaagatgataaggaaatgctaaaggaaaatattataagactttgtaatagtaataaaatagatttaattcttacaaatggaggtactggtttttcaaaaagagatataaccccagaagcaactaaggaagtgttggaaaaagaaataccaggtctgagcgaatatatgagaatgaaatccacagaaattactaaaaaggccatactaagtaggggtgtgagtggaataagaaataattctataataataaatttacctggaagtcctaaaggtgcagttgaaaatctaagttttataattgatgttttagaccatggcatagaagttttaagaggagaagctacagaatgtgccactaaaaaaagtgaatagtatataatctagatagataaaaaatagacaaagaggtagataaagtatgattgataagtatggaagaaaaatagactaccttcgtatttcacttacagataagtgtaatttaaggtgtgtctattgtatgccaccagatgtaaaatttgataaaaattatataaatgaaaatctaagctttgaagactacaagtttattataaaggctatggctgaacaaggtataacaaaaattagatttactggaggagaacctcttttatatcctaaattaaatgagcttataaaatttacaaaagaagaatgtggaataaataacataggaatgactactaatgctattgggctttctgatagaatttttgagcttgaaaaatgtggcttaaataaagttaatataagtttagattctttgaaggaatataagtataaatccgtaacaagaggaggaaacttaaaagatgtcttaaaatcgattgaatcttgtttaaacttaggtataaaagtaaagttaaattgcgttgctataagtgggtttaatgatgatgagcttaaagattttatgtttttaacagttaaatcaccaattgatgtaagatttatagagcttatgccattaggtgaggctaatagagtttataagaagggttattttaatgtaaaagaaatgattgaaaaaatatatggtttatataaagtcaaaaatgatgaaaaaagtacagcagaatattatatgtttaaaggagctaaaggaagaataggaattataactccattaagctgttcattttgtaacacttgtaatcgtattagacttacttctagtggtgcaataaaattatgtctacattcaaaagaagaaatagatataaaaccatttttacataaaccattgttatttagagaatctatgaaagatataataaaacaaaaaccagaaaaacatcatttaatagaaaataaatgtagtgatacaaataggcgtatgtatgaaattggaggataagtaatgttaacacatataaatgaaaaagggtatgccaagatggtggacataagtgaaaaagatgatactaaaagaacggccgtagctacagctacaattactcttagtaaggaagcattagaaaaagtaaaaaatggtcagataaaaaaaggagacgtattgtctgtagctcaagttgcaggtataatgggagctaaaaatacatcttcaaacataccaatgtgccatcagattaaattagttggatgtgatttagaatttgatgtagatgattatatgtctgctattaagatatacgcaacctgtaaatctcttgggaaaactggagtagaaatggaagctttaaatgcatgttctttagcagcacttacaatttatgatatgtgtaaagcagttgataaaaaaatggttataagtaatatccatcttgtggagaagactggtggaaaatcaggagattttaagttcgagtaaattaataatatattgggttaaaatttggaggaaatatggcgaaggtagtgtcaataaatataagtgagaaaaagggtgtaattaaagttcctgtaccatgtgcagagctaaaaataaatcatgggatagttggagatgcacatgcaggaaactggcatcgtcagataagcttacttggaaaagaaagcatagataaaatgaaaatgaaaggctttgaccaattaaaatatggagattttgctgaaaatgtaactacagaagggatagaagttttttccctgcctgttggtacaaagttaagaatagggcaatgtgaagttgaagtaactcaaatagggaaaaaatgtcacaatggatgtgaaattaagaaattgacaggtgactgtgtgatgccacgagaaggaatttttgtaaaggttctaaaagaaggaattataaatgtgaatgattcaatagatgtaatctaatgaagtcactattaaaatataattataagtaaatactattaagatttaaatatatattttaagagagaattaatttaaataaaatattttagttataaattggaatattggttatataaagctatgaatgtaaaatcatagctttttgtttttgaattttaaaatataatattttatttatatatattaaattatattttatataaaatcaattgtttaaatatatattatttatactgtaaatttatagataataaagtataaaaaaaatatattttgatgaaatttaaaaaaatacattatataaatatagtaatagtatgaaaatttacatataaaactaaaaaatgtaagtaattgactttttaagttgacaaaatattgcatatatattatgatataaatcataaattaactacaaatcaatattatatattcgtagaagaagaaagtagcataaaggaattttacagagagttagatttggctgagaactaatattggaatttatgtgaaaaggactttggagaatactattgtaattatgttagaatagtggtttaattcgccttaagaaaatgagtgagtaaaattaatttttactaataagagtggtaacacggatttatattcgtctcttggatttttccaagaggcgttttttattataaacttatttcagaaaatttaaaactatatattaaatgaaaattataaaaatatgatagttaataaatttataaattagaaaattgtaaaatatgctaaggtcagtagttttacgatttaaatggagggatgaaaatggaagaagaaaaaattaactatgctctggaacagattccagagaatcaaaaacgtggttgggtagctatgttttcagttttagtagcaataggtgtggatttatcatctgttattttaggcgctgagttggcacagagtatgccaatgaaacaagcaatattgtcagtaattgttggttcatttttttctgcaattttgtatactacatgctctttggttggttcatctacaagtttatctacatctatgataacaaagtatgtatttggagaagctggagcaaaaatattttctctagttataggggtttctctattaggttggtttggagttcaagtaggtttctttgcacaaaatgcacagataataataaaagatatatttaatttagatgtcagtatgcagattttaagcctaataggtggtctcttgatgatgagtactgcaatttatggatataaggccatggagaagttgagtgtgtattcagtaccatttttattagttcttatgatgctaactatattcttagcttttagagcaaatggaatttcagttgatgataatatgaaatctactatgacatttgcaggtggagtttctctgtcaatgagtataataatagttggtgcaattgtatctcctgatataagtcgttgggctaaaagtagaagagactgtgctctttcaagctttttgggaatacaatttggaaatgcttttatgataatagtttcgatagtattagtaaaatgtatgggaacttcagatattatgagaatttttattacattaggaattgctataccaggtataatagtacttacattagcacaatggactacaaatacaagtaatgtatattcagcatcattaagtatagctcttgtacttaagaaggctcctgagaaagtattaactatagtccttggtattatagcaacattattggctgtatttggaatatatgaaggttttataggatttttaaatttacttggaattgtaattgcacctgttggtggtgtatatacagcagaatattacatagtaaagcaagaacttaaaggctttgataaaggagtattatataaaccaatagttaaacgttcaatagtgtcttggataattggtatattaataacttacctttcaacatatggatttataactcttactactatagcacctttagatggttttatagcagggtttgtagtacaatctattattggaaaagtgctttgttcaacaaaaaataagcaagaaatagacaaagcagtataaagaaatttgtttataaagtataaaataaattagaaatatgaggagaaagtaacatgagatttttaacagaagaaagtgtagataaaatagcagttggtgcagcagtgcttggaactggaggtggaggtgacccatatgtaggtaaattggttgcaaaacaagccattaaaaagtatggtcctgtaaaagtaataagtttagatgaacttgatgatgatgctttggtagttccagtatctggtatgggttctcctgtaattacaatagaaaaattactttcagaagtagagttaactacccctttagaaataatggagaaattattaaatagaaaagtggatgttataattcctatagaaataggagggataaactcacttatgcctatagcagttgctgctaaaaaaggacttcctatcttagatgcagattctatgggtagagctttccctgaagctcaaatggtaactttttatcttgaaggatatgaggcatctcctgccgtaatgtctgatgaaaaaggtaattctgccatcctttatcctgtggatggaatttggtcagaaagattagctagaactttaactgtagaaatgggaggaagttcttctattagtgactataatttaagtggagctcaagttaaaaaagctgctataggtaatactcttacaatagctgaaactataggagggtttttacttgaaaataaatctgattcaaaaggtgctgttgagaatatactaaaagaattgtgtggatacaagttatttgaaggaaaagtaattgatattaagagagagttgaaaggtggatttactagaggacatgccttttttgctgggattaatgagtatgatggagagtattctatattattccaaaatgagaatttaattgccaaaaaaggtgatacaccactttgtattacaccagatttaatagcagtattagatttagaaactggatttccaataactacagagagaataaaatatggctctcgtgttatggtagtagcttttccttgtaatgaaaagtggagaacagaaaaaggaattgagacagttggacctggatactttggatatgatgtggaatataaaacagtagaagaattacaaggaaaataaaagtttaggaggaaattttgatgtatcgtgtaggaattgacgttggaggaacaaatacagatgcttgtatactggatggggaattaaaagtaattcattcagttaaggtggcaactacaaaagatgttgaaactggtgtttacaatgccttaaaaaaagttatagatgaaagtaagattgaccattcattaataaaatatgctatgcttggtacaactcattgtacaaatgctattgtagaaagaaaaagacttaataatgtagctatgataagaataggaaagccggccactactgccattcttccatttatagattggccagaagacttaagagaaaaaatagaattagattcaatattggtatctggtggatatgagtttgatggtagaaagataaatgaactttgtaaagatgaagttgtagagttttgcaatagaataaaaggcaaagtggaaagtgttgcaataagtggagtatttgctccagtaaataaacaacaagaagaagaagttgcaaaatgggttagagaaattttaggggatattcctatatctttatcaaatgaaataggtaatataggtatattagaaagagaaaatggagctattttaaattctgcattgtctcaagtaggtaaagctgtatctttaggatttgaaaaagcacttaaagacttaggtatagatgctcaaatatatttcagtcaaaatgatggaacattaatgaatttagagtatacaatgaaatacccaatttttacaattggatgtggaataacaaattctataagaggagcttccttcttatcaaaagtaaaaaatgcaatagtattagatgttggtggaactacaagcgacttgggtgtactatataatggattccctagagaatcatctattccagttacaattggaggagtacatacaaactttagaatgccagatgttttaactattggtcttgctggtggtacatgtgtaaaaggcgaaaaagataatataaagataggtcctgaaagtgtgggatatagaataactgaagatgcaataatatttggtggagacactctaactttatcagatgttgttacaaaattagatatggcgtttgaagatagaaaaagcaatgttgaaaacttagataaagagtattgtaatgaggtatataagaaggttattttaaaattagaagatgctgtagaccaaatgaagactagtcaagatgatgttgaattggttttaactggtggaggaagtataattgttcctgaaaaactaaaaggcataagcaatgttataagacctcctcattatactgctgcaaatgctattggtgcagctttaggacaaataagtggagatgtagaaaaagtatacagtttagataaaatgtcgagagaagatgccatagaagatgcaaaaaaagaggctgtaaataaagctctaaaagctggtgctaaagaagatactatagaagtattaaatatagaagatgttccacttgcataccttcctggtaatgcacttcttataaaagtaaaagttgttggtgatttaatttaaagaataaatataagtatttccagaattatataaatatttctggactcatttttaaacttattttatcaataaaaacagcataacttttgactatattcttataagtttccgaacagccgatatatacctattttttgaggtttatcggctgtttgttatcttttatcgcattccaactatttttcttaccgtatttgctgtacgaattgtaatcttatcacttacatttgaactggcagtctttgaccaccaatttgtctttttataatctttacgactaaaagaccaaaagatagcatttttataatgatatactttttcatactcttctttaggatttccaacctcatcataaaactcgtcataagataagtcaggaaacataaaaataagattatcatatatttctttgttgttatctccccaccaattaggagcattatttagtatatcttttaactcctcttgtgaaataataaaaactggtatttccaattcaaactgtttttttatcattaatcttattgtatttgagataaccttgttgtcatctacatcacttaaaaagacaacattaccactattaaggtatgtagaaacttctgaataaccaagttctacaaagcttgcttttaattcagacataattatcttgttcttaccacttatattgatacctcttaataatgcgatataacttttcatataataagttcacctctaaacattcacatttttctatgtagtacaaactggaatttgcatcttttataattctttcaaaacttcttcatatgtaatttttttaatataaaaaaatcggtgcttaatttgtaccgatttttatttttcttagtaaagaactcgtttttttgcttctgctatagctctagcagcactttttgcttgcattcttttttcttcttcttttttaaattcatttattgtttcatttagattcttatcatgttcatttttttctttatcttcgttttctctgtatactaatatataatctattattgattcgtttattatctgagatatacttttattttcattaattcctattctcttaacttccttaagtagagtctcatcaatatgaaccgttgtttgctttgtattttttgccaccttaatcacctcttaaaaaaaattctaacattaaaattttttttagtcaataaattttaatattaaaattctttaaatgttttatttgattttctaaaattttctattgtatttatcatcttattttttatattttcacctagtacagaagactttagtctaggattttctatatggtcataaattggttctaaaaattcgacttcgacaggaacagagttaattttaccaataggttggtatccttcataagtatcttttgaattttttattacgagtggaacaatagggcattttgctttatatgctatctttaaagctccacttctaaactccgaaaccaatgaatttggttctttaatccatgttaaatctccttctggaaacactgccatactttgacctgtaagtatattttgagaggcttgggctatactctttataccctcacgattgttttttctgtttacatatacacatcttagtaattttgcccattctttaaatataggtatatttctccaaactggttcatctgcaattacacatccaattggtctttctacacttgctgttagtatgaagctgtcaagcatactagaatgatttacaacaaatagaagtggttcttttggcagtgtttccttaccaattatattaagctctatgttcactatatctaaagattttttagcttgtttttgcataaattcaaatttttcctttaagctaaatttatcaggattctttttaattttaataaggctaggtatagaagatgtaaaacctataagttgatatgtagcaaattttaagtaattattcataaaattatctccttaaaataaaattatttattactgtaaagattttaacataaaataaaatttaagtctattttaattcaattttgtaacatatattttaaatagacagagattgagattttatatttctaattttagtaatcagattttatcaataaattactattctattaatttaattaaataacctttaaatttaattataaaaactgttgcagaaatttctacaacagtttaaaaaatttaccttacaaaaacttattttataacaagagagtatattataaggctagtacagcccattttttgcactgagaaattcttttgccatcatcaccttgttctttgtcatatgcaaattgattaagcatttcacatggaaatgtatcacatagaccacaatgtataaggtttttatcttcacaacaagattttacaggacattgttcaccccaaaatggtttctcaatatctgtacaacctttacaattgactttttccttgtatccacattcataacataaaattccacatcttgattctatcattttaagtcactccttaaatataaattttattatgattgtatatcaaaatttatacttttcattgtaaaaatcggacaaattttttatataggttgttggattaacaccacaaatagatttaaaatcatttataaaatgagattggtcgtaataaccaatatcttgtgctaaagttgcaaatggtcttttattgttttgtacttcttgtaatacaaggtttatacgaagtaatctaaggtatgatttaacactcatcccaagagaattattaaaaattctatttaaatgtcgttcactataacaactaatttgtgaaatgtttttaacagacataatagagttctgttttctagcattttcaagaattggtatagtcatatctactatatttgatttcaataagtatgataagaataacatatctaattgttctactaattcctttatagtacttgttctttcaaaaatggaattaacctctaagctaaataatgtgttaaaatcttcaagtgaaatttttaaatctgtagattctctttgagaaagacctgtcaaataatatactccacctgggcgaaactcaacgaatactctaaaaagtacattttctatatcattttttacaatagtagtttttgttgtggctccccagaatgcgctttctataccttttttgtcaaatttaaatatcatacatccactagcatcaggtattaatgtaagcttttctttaatacttgtatctggaatagatattgtatagtgtgctatatactgtcttaacaatttatgtggcaaaatatatgtatactgtttgcaggtatttaaaatgttattgattattttattcataagtatatcctcctgatatataaaaaataagtatactaatttattttttatataataaaccagttttgttttaattgaaatattctaataagatattttgttaaatttagatacaataattgtaaagtaaaatctcaaaatatacaattattataaatcatagatatttattaaataaatatattaaagaagaaggaatataaaacaagattagaaaataatagtgttactttcataataaatacatataaagatatttttaagaataaaatttattattaaataaaaaataaaggagagtgatttaatcgtatggcatcaaaacaaacaccaagaaacaatttagaaaagtttttaagaataagagtcttatcacatacaggcgataaaatacatataaagttacctgtaaattttgcaaaaagaatgattgagaataatgctttggatttatttaatggaaaagatgatgtagtagatggtaaaaaggttactgaaatattagtcaaagcatttgactatgatttaactggagaagtagttcacttggagagaaaaaatggagatattattaaagtttcaattgtacaatagaattattttatatgaattttatttttgaatagttataaataattagaaatttgtaaaaaagtataatatattattagtaatggtgcagaatacacatttataatttatagatgtgtattttttgtttaaaaaatttaaatatataaaactataaaggttacaattttggaaatagatgtaaatatatgttctattgtataataagagtaatataaaatctagtaaaaataatcaaataaatttaacttatgagagggataactatggaaaataaggattttaaattaacaatatgtatatttgcttttgtaattggagtagtagtattattctgctgtataggtttgggtgaatttagtgcagagcatattattcaacaaaatggtggaatcatggatactgaccaatataatatttatctagaccaatctatttctcaatatagaaattttggttctatattagctctgttaggaggaatagggatattgtttgataaatatatcagaaaatactagagattatgttttgtctaaaataaattcttatgaggagataaaaaatggcaacagaaatatttactgtaaaaattacacccttagaagcacaaaaaatgataaaagaaaatattgatgcagatttagtttttagtgattcttataatttaggagatgataaatttatactaattacaacttttgagaagtattacgcaagaaataatagtgatgcaggattaatcgtagtttatgaaaataccacagaaaaaacagttattaaagctacttcaacaggcagtgcaattggagttttaaaaattgattggggtgcaggtggaaatttacttaaaagagtaaaaaacatacttgctgaatatattatttaattattttatctaactgataatatgtcaagaaaatctcgtaaaagaggttaagaatatttttataatatatagataaataaggatttgaaggtaaagtttttaatgtataaagaaaaataatataataaaacgaattggctttataattctttataaggcaaagagtacatttctttatataattgttggatattaaataatatgtaaatacaccatttacatataaaagtttaattaatatgttaaaagaaaatgaaatggaaattactaaaaaatacttttaaattggataatgattgatattacgtttatacaaaaatcaagtagaattttatatattttaaatatgatagtttaaaattatgaaagaatgataaattccagtttgtagggtagttttgataaataatattaataaatatgagtaaaaagtaggagcatattaatataatattcctacttttttattattaaaattgtttatgatatcaacactacattaaaacacaacctaaatttgaaaaacaaatagtttagaaatatgtactttttttatttattatattcttttaaatcgaattttttcatctgaacataaagtctcaaatctatatgcatctgtcatctcataaaaaccaaaaaatataaagccatcacgagaagtaaattcatattgtatattttcaattttcaacatgttttctacttcgcttattttttcgctatatataatttctaccatataatttatcattgtagaatccctcctattaatatgaaaatatccaaatatataataacatatttagatgatataatagtatccaaataaaaaataatcttattacattattgaatgaagaattaaaatgaagataaataaaataaatattggttataattgattaaaaaatagttatgtatacttgtgactttagttatgggcagttcaagttttatgaaagaagtcatatatatatggaatattctaggcagaagctgtttaataataagagaatactataaaaatttgagtattacataaaaaataagaagccataaatgatataagcattatctatagcttcttacttctcattgattaagattatatataaaaataatcactatattttttgtttaagttttaatacttgttttactatatttgttgagtggtcagaaattctttctagattagtaagtaagtcaagataaagtacaccagcatcaattgtacaatttccattatttagtctaatcatatgtgaatttctaaaagttttttctaaataatttacttcattttcaacttctaaaactttatttgctaactcaaaatctttaacatctaaaactattaaggcatccttaaaattagtaattgtcttattgtatatttcgtatatttctcttatcgcactatcagaaaaactaatgttcatttccttaacactcatggccaattcagctatattttctgcatggtcagagactctttcaatgtcatttacagtattaaaaagcaaatctgttctaaagcgttcatcgtctctaagaggttctttagaaagttttaacaaatagttcaatatatctttctgtaacttattgacaactttttctgactcaaaagctttattaatatcttcattgctcttatttaaaaatcctgcaattgaatgttccaaagagtttgtagctttatgacccattcttacaacttcttgtacagtattaccaagtgctatagatggagtgctaaacatcctttcatctaagtacttagtattatttactatttctgattcagtttctttaataggtataagtctatttgctaatttaactatgtatttagaaaatggtaataatattataacatttgtaagattaaataaagtatgtgcatttgctatttgtctagctgtatcagttgggtcaaaatgagtaactatggctgatataggtttatttaaaacaagcataaatattattgtaccaatgacattaaaacttaaatgcattacagctgcacgtcgagcatttctacttgcaccaacacttgataaaagtgaagtaacacaagtacctatattatctccataaagaataggtaaagcagatgatagaggaagtattccttgagaagctagtgctattaacatacccatagatgcacttgaactttgaacaataccagttatggcaaatcctgccaatatacctaatacaggatttttactaaaatataaaagtgcatcagtgaatgctttatattcagcaagtggagctactgcatctttcataaactccattcctgtaaataatataccaaaacctataagtatctcagataaatgctttgttttttgatttgatgtaaataaatagaataaaatacctatacctaaagcaattggtgcaattccttcaagattaaatgaaactaattgagcagtaactgtagtacctatatttgcccccattattacaccaatagcttgacttagattcattatacctgcatttacaaatcctacaaccataacagtagtagcacttgaactttgtataatacctgtaacgactgtacctaccagtacacccataacaacattacttgttaagagttcaataattttttttaatttgtctcctgctgatttttgtaaaccttctcccattaaactcattccgtaaagaaaaagtccaagtccaccgataaggctaattactatattcacgatatttcctcccttaagaaattaatagtttttttatctgaattataaactttattaactaaaatttattgtttccataatatagaataacaaattttgtcaatagaaatattaatgttttgttaagtatacgttaagagaatgttaaatttttaagttgttgttaattttagaaaatttatgatatatagcaatttaaatacttgaacttagatttttagtattttatgtacaatcaatttaacaaagaattaactataattgtaaaaaatatgtaaaaaaatagcatccttttagaatgatattttttagttataaatatttttatattcaattggtgtaaggttattaaactttttaaaaattatactatagtaattttgactattgaatccaattagtacagtaacgtctaaaatagacaagtctttttttaatagatactttttgtttttttcaactctaactttatttaaaaaattagtaaaagtatatccactttttttcttaaacaaagaaaaaaataacttttattaagttgtaattcattacatatattacttactgttatatcttctgagtagtttttgtgaatataatctatagttttctttaagttttctttacataaaactaagagttggtctatgtttcattttatcaaggcatatttattaaaaaatcaatctctatttgttaaaataatttatgaatgatgttagaaactgtaatatattggatataatataataaacagataaactctgtattaagaggatatatagtttatcttaattataggggaagtgaggatatattatggaaagattaatggaactcatagaaagaaaatttttaaaggatgtagaacttttagaattagaagacatagaaaatgtaatagaatgcaaaatgacacagccatataatgctcattataatgaatacttagtaaaagtaaaaaatggagatgaagtagaagaatattttgtgtatttaaaacatagataaacataaaagaggtttatatttatttgtatgattataaaataaatacaagcctctttttttgataaatataaaattataaaatttttatttatttaattttttcaacaacattagtcaatattgaatctaaatcatcactaatttctgtaactccattatgagtaatatctataatttctttagtcataggaagttctcctaaaagctctaagtctaaatcatctaaaaacttttcagtagattctccttcaaataacttgatttttttagaacaatcaggacattggatataactcatattttcaataactccaaggacatttatgttcatttttttagccatattaacagcttttgatacaatcatagataccaaatcttgaggtactgaaaccataactattccacttataggaatagattgcataaccgttaaggcaacatctccagtaccaggaggcatatctattaataaatagtctaattcttcccaaagtacatcagtataaaattgctttacaactcctccaagtaaaggtcctctccaaacaacaggttcattctcatcatctatcataaggtttatagacattacttttatgttatttgagttttctacagggtaaatataagagccatcagaataagcttttacattttttacacccataagtctaggaatacttggtccagttatatctgaatctaatataccaaccttatatcccattttgtttagcttattagcaagtaaagcagttacagttgattttccaactccacccttcccactcataacaccaattatttttccaaatttattgttagggttattttcaatagaacaatttgattgactattacaatttccctttgatggacatgaattacaatctgccatatctattacctccaaactttaatatttattagattatttgtaacctacatatactattttagtacaattgaaccataaagtcattatttaaaagcaacttagaagattttctattgatttattcatagactatagcaaaaagaatacaataaaaaaattataacattcttgaaaaagtgattatttcaatttagttatagaacttagtcatataaatatatagaaaatattttaatatattatacataacgggttattttataagtttaactataaattaggtttatattttataaaaatttgttaaaaaaaacaattaaaaattgtaaagaaaaaagatataattagaactgtagtaataaatgttttattatagataatagagttttaagtatcttaaataatatttggaggaatatgaatggaattaagaccaagaagtgcaaaattagaagaatttgataaagtaatagaattaataaactatgtatttagaatatcaagaaatcataagccaactatgatggaagaatttcctcttttactaagtaaaaataatatagaaaatatgattataatatcagaagatgataaagtggtttctgatgtaaactatctaattcaagatgtatctattcaaggaaatagattgaaggttgcagctataggtggagtatgtactcatccagattatgaaaagagaggctattcatctaagatattggataaagtagaagaaaaaatgttttatgatggtgtagatattgtaattatatcaggaacaagaagtctatacagtagaagaaattgtagtttggtaaagagtttttataaatatacaataaaacctgaagatgtaaaaatagcatatgaaatagttgaatttgatgaaactaattttgaaaaagatgatgatttagataaaatgcttgaactatataatcaaaatagtactagatttataagaacgagagatgagtttcaaaaactattgcatgcagcaactattgcctggggaccaattggttacaagaaggtatttataaaggaaaataataatataataggatatttgataataagaacaataaaaaaagaagattctactgtaggagaagttgctgaaatagggttaaactctgtaaatgttgaaaatatattgaaatatgttgcaaataaatttggattagaatatttaaattataaagtacatgtgaaaaatcttaaagaccagttgaaatgtaatgggacagaatctttggactatcaacaaggaactatgaaaataataaattttactaagttgtgtgatagtttaagaagttattttagtcaatatgtagattttgaattactaaaatacatggaatttaaacaagttgaaaataaatatattattaaatacaaagaagaagaacttgtaatagaaaatttggataagcttaataaactgttttttgaaaaaaatgaggaacagtataatgaatttaaacatctaaaaaatatatatgaatttgctacaaaggcatttcctgtagattttccatggactgcaaatttaaattatcaatagttttagatgatattaaataaaattgattgatacctagagttagtccttgttaaataagagaaattattggatattgaaaaagcaattttgtaagtaattagaaaggatgagtattatatggacatacttgatgatatagcagaatgtatattaaatatgggtgtagataatatagagaatttagtaaaaattgctatagataaaaatattgatgtggaagatatttatgaatatggtttaaacaaaggtatgataggagctttagataagtttgagaataaggaatactatctttcagaagttatagtatgcacagatgcattaaataaaggtattaatcttttgaagggaactggaaaagtaaagaaaaaatcaaagggagtaattctgatgtctgtagtagaaggagatactcatgagataggaaaaaatattgtaaaagtaatggtagaagccactggatataaggttattgacttaggtgtaaatagaaaaagtgaagatataatagaagaagctataaaaaacaatgtagatataataggcttatcttcaatgatgacaactacaatggaaaatatgaaatcggttatagacgagcttaatatgattgagatagataaaagaccaaaagtaataattggtggaggacctgtaagtatggagtttgcagaagaaataggagcagatggatacagttcaaatgctccaaaagcagttaaattaataaacaaacttataggaggtgaagtttaaatgttttcagatatgactttacttcagtatataaatagtgaagatagaggtttttttctgcctgatatgggtacaaatggattgttcttaataaataaaaaggcatatgaagtatatgatagtgtagatttgcaattagaattagcaaagactatggacaagtattttgaatcagattttatatactcattctgtgatgggattacattttgtgaaactctgggtttagagacattaagaccagattatgattttccaagtgtattgacacatactataactgacagagataaattaagaaaattagatgttccagacccttatacgagtggacgtatgccactcaatatagagagcttatcagttatatcaaaaagtattaaaaaaccactatatgaatcgatacaaggtccatttacacttgcaggtcaattagctggagctactcaacttttaagatgtataataactgataaaaaatttgtagaagaattgttggaatttacaactgaattggtaagaagatatgctgtagctgcaaataaagcaggagcaaaatatatttcaatagcagagccaacgtcagtaaccctaagtaaagatagatttgatgaatatatagtaaaaaatttaaataaaatctacaatgaacttgattgttggaaaggtatgcatatatgtggagacaccagagaattattagataatatgctaagttgtaatatagatgcagtaagtttagaccaaattttagactatgaagaaattgctccaatgattcctagagatatagtgttgattggtaatttagacccaataaaacttcttggacgttctaagccagataagattagaagagagacactaaaattgttaaagaagatgagaggatatgataactttttatgtgattttggctgtaactgcttaaataccactccagtagaaaatttacaagcagctataaaagcaggaagaattaattataaagaattagataggattgatattgatgaattataatagtaataaaaataaatatcttttaaaggatataaatttagaggatatttttatagataagaatattgtgctaaagtttttggggtatggaaatagaaaagctccagatacaattagtgaaatcgttgaaagagaaataagaaatataaatgatattttagatatcaagatatatataagtgaagttgatattaataaaacacctaaagaatgtaaaaaagcatttgctgtactatatacaataggggataaaattgatattaagatgaatgactatatggaaaattgcaatatgatggcagggatagcattggataaaataggtatagtatgtttagattatattaatgagaaaataaaaatgtatttaaaaggaaagtatgatagtcttaaaatatcgcatgaaatatatccaggagataaagattttgaagtagagagacaaaaggatatttataactatgtaaaaaataaatataatagtatagaaatagaaatcaatgattatcatcaactatcccccataaaaagtgttgcaatgcttattttaatgggagatgaagaaaatttagaatcaagatgtagcaaatgtcctagaaaatgcttttaactagttttcaagactaagatttgttttgtgtatgaattgcaataatttttttggtcattttatgtataaactaaaaaaattattgcaaagtaatattctatttaatttgaacagacttacaaactatagtagtttctttaattcaataagtgtatttatttcataagttggtatatgattagtataatttatactgttattggaatttaaccaacaagtatctattcctgaatttattccacctaagacatcagaggttaagctattcccaatcattaaggcagaagatttatcatgacaattaaactttttgagagcgtatttaaatatttcaggatttggttttgatattttcaactcttcagatacaaccattccatcaatatatccttttatttttgaattttcaagtcttttcttttgaactgcagaaattccatttgttattataacaatagtatacttttttttaagatattgtaatatatcgattgcacctggaattaaaaatgtacattcacctaaaaaatttaagtacattttgctaagagtttcagaatcaacatccaaagatattttatttgcaaaaagttcaaatctaagtaatttaagttcattcaaagttataatatttttttcaaggtcgagccaaagcttatcacttatatttctatatgactctatataattctcaaaattaaattctaaatcaaactcagatagaagttttttaaaagcatgtgattcacttttcttaaaatcaaataaagtatcatctgcatcaaaaaatataaatttatatgtcttcatggtttttactcctttacaagatgactgcaaaaattactttactttcactatttgagtcattttgccatttatgctttgttcctaaaggaacttttacactatctcctttggacaaagtaaattcatcatcatccataaaaagtttaacttctccctccaaaacatatgcaatttcatctccattatgagtaatcctatcaatacaagaagaagtatttggagctaaatccataattgcaaattctaaattaccactagagtctggaattaaaatctcatatataacttctttgcttccaggtaaaataactttttttctattatcatgtcttactatcaagttttttttatctacttcagatacaaaaaatgtaaataaaggaacgtttagagaagaggctatagattttaatgaatttacagatggattagcaagacctcgttctatttggctcaataatgatggtgtaacatcagctagttttgctaaatctcgaatacttaagttttgtttttttcgaacttcagctattttttcccctaaatttaaatcattcatataaatatcctctctttttaatttaaaaaatattaacttaaaataatcaagtaaaatgattatgtagtatgaaattattataacatatagaattaggttttgaaaaaactatgttcaatataattaaataaattaaaatataattgacaaagtggatacagaatacttaaaatatatttaaataaaattaagcaaaagatagttaatttatgataggaggggacattatgcaaataacgacttttggagctatatttggtttattaatagcaattattttaattataaaaaaatttcaagctgtatatagtttaatgttaggagcatttattggaggattagttggaggagcaaatataacacaaactgtagattttatggcaaatggagctatgaatatatcaccatcaattcttagagctttggcatcaggtgtattagctggaagtttaataaaaacaggagcagtagataaaatatcagaacagattgtaaaaatatttggtgaaaagagggctttattttcgattgccatttcaactatggtacttgctggagtaggcgtaaatttggatgtatctataataactgtagcacctataggattatatataggtagaaaattaaattattctaaattgtcaatactattagctatgttgggagggggtaaagcaggtaatataatatcaccaaatccaaatactatagcagtagcagataatttttctgtcaatctctctagtgttatgatggcaaatataattccagcaattattggagttgttattacagttattttagcaagtatattaataaataaaggaaataaagtacaatcatatgaaattttagagcaaagagaagatttaccaagtttatttaaatcattatgtggtccaattatagctatatttctattgtttttaggaaatgtatctcctatagttatagacccaatgatagcccttccaataggaggaatcgtaactctaattgtcacaggaaacttgaacaattcaagagaatatttagcttttggattatctaagatgcaaggggtatgcatattattacttggaacagggactatcgcaggaattatacagatgtctgaattacaacagagtacaataggtgctttacaatttttaaatatgccacaatttttattggcaccagtttcgggtatacttatgtcattagcaacagcatcatcaacagctggtgctactatagcatcatctacttttcatgatgctataataaatggtgggctatcaccgatttcaggtgcatcaatagtaaatgctgggtctagtgtattcgagcaattaccacatggctcactatttcatactagttcaggtagtataaacatggatataggtgaaagatttaagttaattccatatgaagcattgataggaatagtaatgactataatttcaacatctattcaattagttttataataaatataaatatttaatgaaaaaagtaggattttgttattaaatattgaatttattatagtaaaaaagaagattggagttttaaagtgaataaaaaaaagattgttattatagggattatttattcatttttagtagtattttcacttacaaatatgtatgtaaatatggagtataatttaaatgtatttgaatatattaagaagtcacttccatttacagaagaagaaaaaaagtggttagaaaaacacaagaatttgatttacagctctgaccaaagttcacctcctttgagatataagggtaaggaagatggacagtataagggaattattgttgatttaataaattctctgtcaattcaaattggtagagatttttattttaaaccaaataattggtggaaagaatctttcgtaaattcaatagatgatagtataaagttttttgacttgattccatcaaaagaaagggcaaataaatttatatttactgacccaatatacactttgagtgcaaatatattgaaagataaaaagtcccaagatataaatagttacatggatttaaaggggaaaacagtagcaattccagaaggtgattattctataaattttttaaagcaaaaaattcaagatataaacattttattgactccagatataaagactggagtcaaccatttaatgtctggaaaagtagacgcagttgttggtgatgaaccagtattgcgatactatataaataattatggactttcaaataaatacagtgttttaagtaatcctatatatactaaaaaagcagttcttgctgtacctaaacaatatgaagagctggttagtattttaaataaaggcatttttaaacttcagaaaaatggagtgtataaagatttaaagaaaaaatggtattctacgtataatgaagttgatgatatattgtatgagcgaggaattgtgcctagtatttatctttttataggtataattttaatatcaatttatgttttttatagctatacatatttgttaaagatagaaatcaaaaggaaaacagaacaggtaatagaaaataaaaaaactttagaggcaacttttaatagtattacagatataataatgcttgtagatgaaaataacaatatagtagaatcgaacaaagtactatatgactttatgggtgaaatgagttataagatagcagatttgattagcatgataaaaggtgttattaaaaataccttctctgaaaatactaataaaactagtgaaatagaaatatacaataaaattttaaagataaacacttttcctgtagagtataaaaaaaataatactgagtatatagtagttcttattaaagatataactaatgaaaaaatagtagaggcgaaattacttagagaaaacaaaatgatatctataggacaattagcttctggggtagcacatgagataagaaatcctttgggtataataagaaataattgctatctattaaaagataacgttacaatggaagaagtgaatgattgtgttaaatcaatagaaagtaatgtagatagggcaagtaatataataaccaacttgttaaatttcgcaagaatatcagatgataatttagaacatataaatataagaaattttattgaaaatatagtgaaacttcaatataaaatgttacagttaaagaatgttgaaataaaaattgactgtgaacataatttagtatgctatataaatggagaatcgttaaaacatgtatttataaatttaatttctaattcaatagatgcaatacatcaagatggaaaaattattatatactgttatgaaaaaaatcattgtttatttatagattttaaagataatggtgaaggaataaaagaagatgccctaaaggacatatttaatcccttctatacaacaaaaccaattggtgagggaactggtttaggtttatatattacttataatgagattaaaaagaataatggagatataagtgttgaaagtaaattgggggttggaacttgttttcatataaaaattccattaaataaagaggtgactatataatgaaaatactattagttgatgatgagctagaatatggagtggtaatgaaaaaaattctacaaaagaagggctatcttgtagatatagcactaagtggtgaagaagctataaatataattaaaaaagataaaaattatgatttggttttatctgatgttatgatgaaaaatatggatggagtacagctattagatagaattaaatctattaatagagatatagaggttatattagttacaggatatggaagtattgaaaatgcagttgatgctatgaaaagaggagctttatcttattttataaaaagtaatcccattgaaaatttattagaagaagttgaaaaggtaaaggcaagtaaaatatctgtttctgtacaaaaaaataattttgaatttactttggaatctaaaaatagagattttaataatatcataaaaatagcaaaaaaagctgcttgtaaagatgttaatatattaatcttgggggaatctggtgtaggaaaagatatattagctagatatatacatagtataagtccaagaaagaatgagatatttgtacctgtaaattgttgttctttttcagaaaatctattggagtctgagttgtttggtcatgaaaaaggttcttttacaggagcagtagatagtagaaaaggtagatttgaactttcgaataaaggaactctatttttggatgaaataggagatatacctctaaatgttcaggtaaaacttttgaggacacttgaggacaaatctatagagaggataggaagtaataaatctattaaagttgactttaggttaatttgtgctatgaataaagaaccaaaagtggaaatatcaaatggaaatataagagaagattttttttatagaataagtacaataacaataactataccaccactaagaaagagaagagaagacttaactactcttatagaatttttcttaaataagtaccaaattgaacatgataaaaagatacactcgattgataaggaagtaaaggattttttattaaattacaattatccaggaaatataagagaattaaaaaatataataaatagacttgtagttttaagtgaagaaggcaatttatcaaaagacaatttaaatttaatatcaaataatgtatacatagatgataaaataagtattagacctttaagagaaataagaaaagagtttgaatgtgagtatattgaaaaagttttatctttgtgtggaaataatatttcaaatacagctaaaaaattggagattagtagaagacagttaaccaataaaatatcagagtataatattaagtgagaaaaaaacttctcattaagtgagaaaaaaatttctcaaactgtattaaaagataaagagaaaaaatctgtttatctttttttattataattttaaaaattaatatttacaataattattggtaaattcaatactggtgtaaattaaaaatgaaaatttctatgacattaatacatagaatatatattttaaataattggcatagaaaatgctttatatattaataaacgtaataaatatttttaattgcgattaaatatattaagggggattttcatatgaagctagagctagggaatatatttataaaaaatgttgaatttggagaaaagacagaagtaaaagatggagtactatatattagtagcgaagaaatagaaaagatagtattagaagatgaaaggattgtaagtgtaaatgttgaacttgcaagacctggcgaatcaataagaatagctccagttaaagatgtaatagagcctagagttaaaattggagatgaaagcaaaatatttcctggaattataaataaagtgaagactgtaggaagtggaagaacccatgtacttttaggagcttgtgttgtaacttgtggaaatatagttggatttcaagaaggcgtaattgatatgagtggtcctactgctaaatatacacctttttcaaaaacaaataatatatgtattgttataaaagcaaaggatggtatagatactcatgattatgaagaagcagctagaattgcaggattaaaaataggtgcatatgtaggtgaggcaggaagagaagttgagccagatgaagtcattgtatatgagacaaagccattattaaaacaagtaaaagaatatccagacctgccaacagtagcatatgttcacatgttacaatcacaaggacttttacatgacacttattactatggggtggatgctaaacagatagtgcctacatttatgtatccaactgaaataatggatggagctataatatctggaaactgtgtagcaccatgtgataaggttacaacattccatcatttaaataatccagttatacatgacttatataaaagacatggaaaagatttaaactttataggagttattttgactaatgagaacgtattcttagtcgataaagagagaagctctgatatggtagctaaattaatagaatttttaggagttgatggagttctagtgacagaagaaggttatgggaatccagatactgacctaatgatgaattgtagaaaatgtagtgaagttggagcaaatgtagttttgataacggatgaatttcctggaaaagatggcaagagtcaatctatagcagacgctactaaggaagcagatgcagttgtttcttgtggtcaaggaaatctagtggttcatttcccagcaatggaaaaaattataggaactttagattatgttgaaatgatgataggtgggtataaaggatgcttaaatgaagacggaagcatggatgcagagctacaaattataatagcatcaactatagcaaatggctataatcatttgacagcaagatattattaaataagtatttgaatataaagttctgttgatgtaatcgttggtctaattgatgtaataactataaagtgatttggaggattaagagatgagtaaaatcagagtggttcattatataaacaatttctttgctggtataggtggagaggaaaaagcagatattccgccagaaaaaagggctggtgtagtaggacctggaatagcatttcagagtcaatttaatgatgatgcagagataatctcaactgtaatttgtggagatacgtattttggtgaaaatattgagagtgcaactcaagaacttttaaaaatgataaaagaagaaagccccgatttatttattgcaggcccagcatttaatgcaggtagatatggagtagcttgtgggactatttgtaaggcagttgaagaagagttaaatattcctgtagttacaggaatgtataaagaaaatccaggtgtagatatgtttaaattagatttgcatatagtgtctacaggaaattcagcagcaagtcttagaaaggtagttccaataatgacgaaactaggtcttaaattggttagaggtgaggaaataggacctcctgaagaggaaggatatataatgagaggaataagaaaaaatttcttccatgaacttagagggtctgaaagagcaattgatatgttggttaaaaagatgaaaggggaaagctttgaaactgagtatccaatgcctgaatttgatagagttacacctatgaaacctgttaaagatttatctaagataaaacttgccctagtaacttctggagggatagttccaattgataatccagacaaaattgaatcttcaagtgctactaaatatggaatttacgatttaacagatatggattctatgtcaaataaagaatttacaactatacatggggggtatgacagagcatatgtccttgaaaatccaaatttagttgtaccattagatgtagttagagagcttgaaaaagaaggtgtaattggagaattagtagattattttataactactacaggaacaggaacgagtgttggcaattctaagagatttggagaagagttttctaagaaattgttagaagatgatgtagatgctgtaattttaacttctacatgaggtacttgtactcgttgtggagcaacgatggtaaaagagattgagagagctggtatagcagttgttcatatatgtacagtagtaccaatatcacttacaataggagctaatagaattgttccagcagtagggataccatatccacttggaaatcctatgttaggagaagaggaaagtaaaaaaattagaaagaatatagttttaaaagctttaaatgcactaacagaggatatagaagaacaaacagtatttgaataataaaaatataatatagaaataaaaaaagatatcataaaatagtttttgaaaattattttatgatatctttttgctatggatggaatgaagaaagcaattaagtaataaaaatatttatagtaaaacagccaattaaagtataaagaatgaaaaaaataaatagaagattatacataaacaaaaaaagagattttaaaatctctttttattatatattaattattttttaaatttatattttttgcatcagattttctaatagctaagtcaaaccctctaaatctaatcactatagggtcattaagaggagctatctttttcacttcaacttcagtgccatctattagtcctaaggctagaagtctcttcataagtttttcatttccagctatattgtctataattcccttttgtccaagttttaagttgtaaacagtcattattaacacctcctaatgaaaatcattatcaaactttatatttataatatataacaaaaagagtaaattgtcaatatataacaaaaaataaacatactaagttagtatgtttataaaaaatagtatacatgggatactaatagcatctagcaaaaaaccacttactaatggtacaaccaaaaaggcttttggagaatcaccatatttttgtgtcaaagaactcatatttgccaaagcgttcggagtagctcctattccatgtccaatcaaaccacttattatgatggcagaatcaaaatcttttccaagtactctaaagcaaataaatattgaaaataggattataaagattacttgaaaagttactattaagagaataggaggtaataatgtagataattcaaataaatctatattcataagtgataaagttaaaaaaattcccaatgaaagttcttttaaaaaatctataagtttaaaatttaattctaatatatttatcttatcatttaaatttctaaaaataacagctgaaaacatacaagttacaacagagggtaatagtatattaaacgttatatagaagcatctacttataatttctcctgtatttatacaaataaatatgagaagaacctgttccaaaaatacagatggtgttattgtttcggagaagttattattttttatcctattcttatttctaaaaaatttacttccaaatctctttagatttctattatatctaggaatcgacaagcctatatttgatgatggttttaatttatatttatttattagaaatttagctacaggacatcccaatataccacccataataagtcctattgttgcagcagataatccaaccccaactgctccttctataccgagattttctattgtaagtccaaatgcagcagaataaccatgaccaccttccatagatacatttccacacataagccctaaaagaggttcaagttttataatctttgatattgtaatagctaatatattttgacaaaatgccaatactccacacaaaatccaatatctaaataatacactaccacctttctttataagatttatgcttatttcaagtcctatagttgtaaaaaagaaggttataaaatttggcattaaatttccacttatagatatatctgctatattaaaatatttaaaaaataaatttagaaaacaaaataatagacctcctattactggtgcaggtatacagaaattatttaaaaagttaactttattcttcaataaattaccaattaaaaagaagaatatagatagtgtcaaggtttgcactatatcaaaacttaaggtaatcaaaataagtcctcctttgtaattcaaagttttaattatataacttaaattcttatgtattgaaattttattatcaaatgtatattaataaatgtatattaaaaagaatcagtatatataattagatagtcataaattaaattaaaatattttaatgagatgtgacttttttagaatgaaaaaccgtagtatattgatataatagaaataagacttaaaaatctgttgatagtattatttataagtacagtaggaggataaaatgtttgaaaatttacctaagatagatttacattgccacttagatggaagtgttagagtagaaaccatgcttgatatagctattaaagagaaaatagatttaccttcaaataatatggatgaaataaaaaaattagcaaaggtttcttttaattgtacttcactagatgaatatttagaaaaatttgatttacccttaaaagtaatgcaatctaaggaaaatttaaaaagaattacttttgaacttttggaagatgcaagtagagaaaatgtaaaatatattgaaattagatttgcaccattacttcacacccaaaaaggtatgagtgttaaaaatataattgagggtataattgaaggaattagagaagctgaaagtatttatgatataaaaggcaatttaatattaggttgtatgagaacaatgacctcaaaagaggcattattagtaattgaagaagggaaatcatttgtaaataaaggtgttgtagcagtagacttgtgtggtccagagaaagagggattttgtaaggaatataaagatgtttttaaattagcaagagaatatggatataaagttacaatacatgcaggagaagctgcaagtggagaaaatgtattggatgctataaatattttaaaggcggataggattggtcatggggtaaaaattaaagaccataaaaaggcgtataatttagttaaagataaaaaaatattgcttgaattatgtccaactagtaatgtacaaactaagacagtagattcttatgaggtacatccattttatactttttataaagataatttacatgtaagtataaatactgataatagaactgtatcagatataaatttaagttcagaactaaatgttatatttgatacttttaaactaggattagaagactataaaattatttatagaaatgcagtagaagctagttttgcagataaagaaactaaagagtatttgaatagtttaatttaatagataaaaatatttaaactttaaattaagctattaaattgacaaaaatacattgtattaggagaaaaaatgtgaaagattatgaagatgttgtttatattaaactagtcaaaaaagaacttgaagaatggaagaaaaatatattaaagaaaccttctatatttgacaaagcatcaaagggtatacagaataaatttaatggagtattgccagataaatatcatgaaataattacttcttctataaaagtaatgacaaaaaccgtactgtttggatataaatatgctacaaagccaccacttagaaatatgtcattagaagaaagagaaaaattagttttagaaaaagctaaaacttacaagaccacagcaatgattgaaggggcaggaacaggggcaggaggaatcctcttaggtttatctgattttcctttgcttttaggtattaaagtgaaatttttatatgatgtagcttcaatatatggatatgatgttaaagattatagagaaaggatttatatattaaacatattacagttggctttttctagtcaacagcatataaacaaaacttttaaattgatgaataactgggatgaatatgtaaatagtctaccagaagacatcaatgattttgattggagaacatttcaacaagagtatagagattatttagatttagctaagtttttacaactaatgcctggaataggagcatttgtaggattttatgtgaatggaaaattaattgataaattatgtgaaactgctgtgtctgcttatagattgaggattcgagagcttaagttataagagaaattataacataaaaaattagttatacaatatatctatatgtatctaattttgcattgataaaaacaattatggataaaaggtaaagcatgatagaatctaatgtagaggtttgtattttaatggaaaaatttagtttttattgcttaagatacaaattgaattacgaagagaagtaattgggaggaatattttcatgacaaatttgccaaaacaatttgatagcttcaatgaagctagacaaaagggatttataaatgcaaaggaacttaaggaaagtgggaaaaagatggttggagttttctgtacatttactccagttgaaattccaatggcagctggagcaactgtagtaggtgtatgcggtgttagtgaagagccaatacctgatgcagaaagggtgcttccaagaaatctttgtcctttaattaaatcaagctatggacatgcaataacagacacctgtccttatttctatttttctgatttgttgataggagaaaccacttgtgatggtaagaaaaaaatgtatgaagaacttgcaaaagttaagccaacatatgtaatgcatttgccaaatacttcaaaaggagaatttgcctataaactttggaaagatgaaatgataagattaaaagaagaggttgagaaatctttaggtgtaactataactgaagaagatataagaactgctataaaagataaaaatgaagaaagagaacttttaaaagagttttatgcacttggtaaattagaaccatctgcacttacaggccttgagttacataatgttttatatcaagcaggttttaaatttgaccgtgcagaacttaaacattctttaagaaaagttatagatgatatgaaagaaagatatgaaaaaggtgaatgtcctgttcaaaaagataagccaagaatattgataacaggttctcctattggtggaataagcgaaaaaatagttaaaactttagaagatgcaggggcatcagtcgttgcatatgaactttgtggagctattagatcaaacgatttattggttgatgaagaaatagaagatgtatatgatgctttaacacaaaaatatataaatataggttgttcttgtatgatgaataatgacaatcgtattgaattattagatagaataatagatgaatataatgtagatgctgtaatagatgtagttttacaagcatgtcatacatttaatatagaaagttatagaataagagaatttgttacaaaagaaaaaaataagccatttatgtctcttgaaactgattattcaaaatcagatactgaacaattaagaactagatttgaagcgtttgtagagatgttgtaggaataaataaaagtaggaggaactatgtttagtataggagttgactcagggtcagtggcaacaaagggtgtgctatttgatggtgaaaaaattattaagaaaataattataccaactggatggagccctaaaaatacatctaaacaggtctatgagttgctaagtagtgaaattgacaaaaaagatataaaaaaggtggtaggtacaggttatggaaggggagtaatggattttgctgataagaaagtaacagaaataacttgtcatactagaggtatttactttttaaacaagaacataaggactattttagatgtaggtggtcaagatagtaaagttataaatttagatagagatggaaatgtatttaactttataatgaatgataagtgtgctgcaggaactggtcgatttttagagattacttctaaccttttaggaagcgatattgaaagtatagatacattagctaaaggatatgaaccagttaatatatctagtatgtgtacagtttttgctgagtctgaaattgtaagtcttctagctcaaaacatttctactggagaggtagcagcagggatacttaaatctattgcaaataaatccacctcaatgttagcaagaggtgaggtaatagatgaagttgcatttactggagggcttgcaaaaagtaaagaactagtaaaaatgatagaagaaatactgggtaaaaaaatttttattgcagaagatactcaaataataggagctttaggagctgctgtaataggatttagataaaaacatataaaaagaaaatgaaaagctgaatttatcataaataagttcagttttttattttattttgtttatttataaaggaaaactttggtataattgatttaaatgattgtatatttgtaaatacttgatatttagtcatatataacattagaattttaaaaattagctcaaaataagggggagaaagcgtgaaaaaatttacttcaaaaaaagtagcaaggtttgttgcactgtttttaatatctattttagtaatgtcaacaattcctgtgtcagctgacaatagcaatacattgaatcagataaaaaaagcagaatacagtgatacttataaacaatatctaaatgatgctaaaaatggacgtacagaaaaatataatggaattataccaaatccatatcagttagaaggtactcaaattcaaagtaaaggaagaacagctccaacatcttatgaccctagaaaattaggtcttatgacatcagtaaaaaatcaagaggatttaggaatatgctgggattttgctgcaatggcaaccttggaaagtttcttgaagttaaataattatggagactacgatttatcagaagaacacttaagatggtgggcttcagatggtgaatatggatggtctgtaaatgatatggatggtgctttaaattatgaagctatgggatatttaacatcttggtcaggtcctaaattagaaaaagatatcccatacaatggtagagtatctaaagcacaaggagcaaaaaaaccaactaatatgaatacagcacctactgtttttaatgtgacagatgctgtgtgtgtaagtaatgacataaattctacaaaaaatgctatattacagtatggagcagtaacatctggttattatgaagatattaaatatcaaagtgatgaccaaaattcatattattgtccaacaaaaagttttaatacaaatcatgctatttcaattgtgggttgggatgataactattctaaagataattttaatgcaaatattagaccatcaaaaaatggtgcttggttaataaaaaatagctggggagattataattctgagggtggatatttctggatatcttatgaagacaagacacttatgtctgatatagataatttttcaatcaaaggtggtaaaaaaccaaatgatgatgagaagatgtatcaacatgactatgcaagtattgtacctttaatttcaaaaaagataacagctgcaaatgtatttgatttcaatagaggcgatgaaactctaaaatctgtaatgttcttaactgaaagtataggagctaagtatgaagtatcttatgctccagtagtaaatggtatacctcaagaaaacaatatgaaaaaattaaaagaaggtactgcccaatattcaggatacataacagttccaattgattcttttaatataccagaaggaaagggtgcaattgtagtcagtatagaggggaaaaatggagagtcaactataggttctgagtcaaatgtaccaggatatgatacatttaaagcaaaagctaatttaggtgaaagttatatcatagataatactggaaaattctttgatataaatagagatagtaacttctatccgtgtaattttactataaaagctgttacagaaaagtcttctggtgagagtatcccgaatgagtctttaattggtagtgatagatatgaaactgctatcaaagttagtcaaaatggtttcaattcttcagaaaatgtagttttagtaaatggcagttcaatagtagatgcattggcagcaactccttttacatctgctataaattcaccaatattattgacacaaaaagaagctttaaattcaaaaactaaagctgagatacagagattaggtgctaagaaagtatacctaataggcggagaaaattctataagtaaagaaattgaacaacaattaaaaagcttaaatatatcgatagagagaatatcaggaagtgatagatacaagacaagtttattattagctcaaaagttaaatggtataaaaaatgtatctcaaatagcagttgtaaatggagtgaaaggattagctgatgcaattagtgtaggtgctgctgcagcagaaaataacataccaatcatacttgcaaatgaaaagagcgaattgcaaggagctgatgaatttctaaattcattaaatatagagaaatcttatattattggaggaacagcatccctatcaaacaatctagaaagtaagttaaaaaatccaactagattatctggtagtagtagagacgaaactaattcaaagataatagataatttttataaaaaagatactttaaaaaatgcatttgtagttaaaaatggaatcaagaatcaaaatgatttaatagatggattggcagttggtcctttaggagcaaaaactgggtcaccagtaattttagttggtgataaattagctgatagccaaaaagaagttcttaaaaataagactttagaaaaagtaactcaagttggtggaggagcaaataaaaatgcatttaaagagttagtaaaattaaaaagtgctaaatagagtacttaagtattaacatatattagtgtgtattagtaacttatcttaataaaagctgaaaataattactttaaattattgataaataagataatcaatgattgtaaagttttgttttcagctttaaatttatgtagtataagtttaaaaacataaaaaagggttactatatatagaaatatagaaaatcttatattttatatataaataacccatatttaattaactttttatagtgttctaatagatattattgaacttaatggtaaatataatgtgtaagtttcatttaaagttggattagattcatctatatatcttgagcaaagtgtaattgataagctatctgcttctataatttcaccatatagaggacaactgctaaagtaagaatgtacttcaacatatttatttaagttttcttgaacataatcgtaaaaacggttttttgtagtagtagccataaaatcaactcctttattttttattaaagttgaaacttttaaaaagataaatatgagtacttctattagaaactaagttaaaaaataagcaaatagatatgaaaattagaataatatattatttatatcttaattataacactagataataaaaaatgctatataaaattcagaattttcgaaagtttttaagcttatttttaaatatactaataatactattgacattagatagaaaaagtattatattgactatataaattattttagtcaaactggaggaaaaagatgcctaaatcgtattctgataaagaaagagagtatataataaaaagacttaaagaagaagcaagattgtgtatggagcaatatggtattagaaaaactactgttgatgagcttgtaaaacgggtaaaaataccaaaaggaactttttatctattttttcaatcaaaagaattgctcttttttgaggtattgagagatatacatgactctatacaaaaagaaatcttatatgagataaatagagtagatgaaagtattacatgtgaacaattgacagatatatttatgaaattctataggatggttgatagtacttcaattttaaatctcatgataaatggagaatttgagatattggtgagaaagttaccagattctataattgaagaacactttagacatgatgactttgaaattggagagattatatcttgcataccaaatgcaaaaaataaagacatagaaagctttagtggagcatttagagtagtttttcttaccatgctatataagcgcgaggttggaagtaattgttttgaagatgctttaagattaatgataaacggattagttatacaacttatggaatagaatttaaattttgtttgctaataacttttattaaaaattattaacaaacaaaaaaattatattttattgaccatatagtcaaaatagtcaaaaatttgaaagggtgatattgaatgattaaagttgatgatttatcatttagttatacagatagaaattttttacaaaatattaactttgaagtagaaaaaggggaaatactaggatttttaggaccatcaggtgcaggaaaatctacattacaaaagattctaattggaatgataactaattatggaggaagtgtcattgtaaatggagtagagagtaaaagacactcaaataaattttatgaaaatataggagttgattttgaatttcctagtttatatgaaaagttgactgcaatagaaaatttaaaatattttgggtctctatattctaaaaaactactatctattgatgagttattaaaatcagtaggactagaaaatgaagcaaataaaagggtatctgagtattcaaaaggtatgaaatctcgattaaattttataaaagctttattacataatccagatattttatttttagatgaaccaacaagtggtcttgacccgtcaaatagcaaggttatgaaagatataattttatcagaaaaatctaaaggtaaaactattattttaacaactcataacatgttagatgcaacggagctttgtgacagagtagcgttcattgtaaatggtaaaatatctgctttagatacaccacataatcttattatgtcaaaaggagctattaaagttagatatacttactttgataatggagaaaaaacttctgaatgttttctgaacaatactgctaatgataaaaatttgaatatgcttattaagaaaaataaacttttatcaatacatagtagtgaaccaacattaaatgatatttttattgagataacagggaggaatttacaatgaggctaaaaaatcttattttaggagatataaagtttcaatttaagtatggtttttattttttatatctttttttaagtattatatatatttgtattatcaatgtatttccaacttttatgagagaaaaaatagctataattatgatttattctgacccagcagcaatgggattgttttttatgggagctattgtacttcttgagaaaagtcaaagggttttaaattccttagctgtatctccagtaaaagtatctgagtatattttatcaaaggtaatttcattaggagtaatatctagtattgtagctatgtttattgctattacattaaatttagataatattataatatcaactataggtacctttttttcttctattatattttctttgcttggattgatacttgcaagtaaagcatctagtttgaatcagtttattgttttaagtattcctattgagattatatgctttattccaccaatactcaatgtacttcttgacacaaaatcatatgcaaatttgtacccttttaatatatgtatttctcttattagtggagataaaaattttataatgattaatattttaatatcaattataataataatttattttataacttattattttatttgtagcagttggaaaaaggtaggtggagtaaaactatgataaagattataaatgcgtttaaacaagagtttgaacaaattaagagagatgctatgctttttatagtatgtgtttctccaatattatgtggagtatttataaaatttggaataccattaatacagaatatatcacttaacaagttttattatcaattaaatttagagccgtatttcttgatgtttgatttacttttagcttttattacaccttttatgttcttttttgcttctacaatggtcatattgggagaaattgatgacagcatttcaagatatttaatagtaactccgcttggtaaaactggttatcttatttcacgatttggaataccaggtaccttagcatttattattactatgattctacttatctttttttctctaactaaaatttctttcttgttaaacttatcaatttctttattagttttattacaaggagttattatatcaatactagtgatttctttatcatcaaataaactagaaggaatggtaattacgaaattctcaggtgtttttatgatgggtattttagcaccattttttattttaaataaagcacaatatattctgttcttcttaccaactttttggatatcgaaggcatttaaggaagataattatatctatatgtttatttcaattgttatatcattaatatggattttattattatttaaaaagtttagtaaaaaaatagttaaataagaaaatttaatatataaatgtaaggttgacttgacagtaatgttgaaaaatgttacatttaagatgtaaagttaaccttacatgaatggagcaaatatgaaaaataaaataaagatattaagagaaaaattaggattgacacaagaacaactaggaagattagttggaacatctagacaggctataaatgctatagaaactggtaaaaatgaaccttcaatatggttggcatatgatatttcaagaatttttaatgaaccaattgaaagtgtatttttatttgaagaaagtgaaagaaaatcaagagcacagataagtaggggagaatattatggctataagaaagataagaacatttgatgatgaaattttaagaaaaaagagtaagtatgtagaaaacgtagataataagataagagaaatattaaatgacatggcagagaccatgtacaatactccaaatggaggaggattagctgcatgccaagtaggagtattaaagcgattagttgttatagatttaggagaaggacttattaagcttgttaatcctgaaattattaaacaagaaggggaacaaattgttgttgaaggatgtttaagttttccagaagtatggggtaaattaaaaagaccaaaaaaagttacagtgcaagctctaaacgaatacggtgagaaaatagaaattaaaggttcaggttttatggcaaaatgtctttgtcatgagatagaccatttaaatggtatagtttttacagataaaattattgaacatgtaaaattgtaagatagattggttattgaatttataaaatattttatagtaaggagttaaattatgagattatggcataaggatttaattgatgtattacctaaaaatcaattagtaagtcaatggagagagctacttgctataaaaggttctatagataaaaaaggtactccaaaccatctattagtgaataaagtattgaattatagtatagatgaatttaaattttatacaaaaattgtacatgatgaaatgttaaaaagaaattataaacctaatgaacttaaatatacaagtatattaaaatggaaaaatagaaattttgcaaatgatatatctaatgaacatagtttaaatttagaaaatttatatgatgattggcataataaaatgtatttaaagcaatgcttatataatttagaagaaaaagcaacatgtggaggaataccaataaatgaatggaatatattactttgtaaatatagtaaagattatgaattgtggtctggaaatatcatgttttaattactatagattaacattatagtattattgtatataaagaggtgattatttgtataataaaataaaatatattccaataaattgtgaaatagcttgtaataaattaaaaaggagtatgccatataaatgggatttaaatatttatcgtggatgtgagcatggatgtaaatattgttatgctatttactctcataagtacattaactccaataattattttgaagagatttatgtaaaaacaaatatagtagaaaaacttgagagacaacttaaaagcagtaaatggaagaaagaagtaatcaatataggaggagttacagatagttatcaaccaatagaagctgactataaaattatgccagaaatattaaacctgctgataaaatacaagacaccagctattatttctacaaagtcagatttaattttaagagattacgatttaattgataagctatctaggattacatatatcaatgtagcatctacaattaccacagtaaatgaagatacacaaaggcttattgagccaaatggtgtggattcaatgagacgatttaaaatgttaaaagaatttagaaaaactaacgcatcagttggtctacatattatgccaattataccatatattacagatgattttgataatataaattcgctatttagacatgcaaaagaatgtaatgtacattatgttttacctgggactttatacttaaggggtataactagaggtgttttttttgactttgttaaaaaagagtttcctgaattatttgataaattatcaatactatatagtgcaggttcacttaatagggagtataaaaatcaattgtataaaatggttaatgaacttagatataaatattctctatcaagcagttactctaaaataatgaaggaaaagttaaaaaactcaggagatggacagatatctttttttgattagttttatataaaaaatttttttttactatgatgattaaaatttattaaaattaaaatttattgacaaatataaaatttaaatatataattgattcataaaataaaaatatgaaaggatgatgttgttcggtgatatttgatatcataaaatcgttgatataagtattgctggaaaagagtgaataaaatcaaatttaataagcaaacaaagtaaagctatagttttattgttgtgcttaaaaatatttggttctattttactcttatttaaactcatctttttgaagttaaaccacagagtaaactctgtggtttttttattttaaaaataaattttaaggagtggtatgttttgttaaacaaattatgtatgtatttagaaagaccagagctttataaacaaagtgaaattaatttttgggatgatgagtatatttcaaaacaattattaaaagcacatttagacactaattttgaaggagcaagtagaaattttaactttatcgaggattctgtaaattggatagttacagttgcaaatccagttaattatcctaatttacttgatttaggttgtggtccaggtttatatgcagagaaatttgcacaaaaaggttataaggtaactggaattgatttctcaaaacgttctattaactatgcacaaaatagaaataaggagactaatttaaacataaattacttgtttcaaagttatttaaatatgaactataatgatgaatttgatttggctactttaatttattgtgattatggagctttgtcaactgaaaatagaaggttattaatggaaaaaatttatgatagtttaaaacctggaggaaaattaatattagatgtatttacaataaataaatacaataattttgaggaaattaaatattgggaaataaatgaagatggaggattttggagtaatgaaaaatatatgtgtctacaagataattgtaaatacaatgattataatacattagaacaaactcttgtaataaccgaaaaagatgaaaatgtattttatgtttggaatcactatttttcaaaagaaagtttcttattagaagttgaaaatattggatttaagtctgttgagttttttagtaatgttaagggtgaagcatattctgacgatagtatgactatgggattagttttacaaaaataataatttttttaaaatgaataaataaaaacttgaaacctttaacaataaaataacataagaaaagcttacatattgaaaaatggaaacttttatgttatttttagtacattacaaattttcttatataaaaatcaatacttgaattattatttttatgtgaaatttatctatagtatatttttataaacaagtaatgttattaaaattaagtatatagttaaaagtgtatagcaaaaaggctgttatattaatgttagaggttcagggaaaatatataaagcaaagatatttacagataatgtagattgcacagctataagttagataatagaattatgtaatcaagaatttacaacaaagtataagataaggataatgctaaattgccatacaggtgctagatgtgtaaatggatttaattaatactattgataaagtgcaacaagcacataaaccaattgatgagattattaaaactataagagatatagttgacataattaaaatattggaacctatttataattttaaatcaaatcaataatgattaagattaaaataatattaaggtatcaatgttataagagtacaatataaggagtactatatagtactccttacttatacatattaggcaataggaaatcttttcatagttaaattttcaaatattttttagggaactttataattgagaattaagggtatagtatgtgatgaacttactaaatttataattaggttatataatggaataatcatcaatagttttactttagggaaaatatatgcttaaggaagtatagcttactaatattattaaaatgtatatttaaaatgataaaaaaagaattagacaagtatttagtaaattgattatgtaaaattctatcaagcaggaaccctatgactttagtcatgggaggttcagtaggtaacttgttgaattaagtttatattatttaaataaactacttaatttagataatataaaaagtcagaattttaagaatagagctatataatcttagctattaggagaagtactatgataggaatatattttagtggaacaggaaattcaagatactgtgtagaaaaatttttacaagaatatgatataacagcaaattcttattctattgaagataatgaacttttacagcacatcaataatcatgagaatattatttttagttatcctgtgcaatatagtaatgtgccaaaaatattgaaagattttataataaatcattcaactttgtggaatggtaaacgtgtttttattattgcaactatggctctatttagtggagatggctctggtgtgttagctagaatattaaaaaaatacggtgctataactgttggtggattacatgtgaagatgccagatagtataggagatgaaaaggtattaaaacattctttagagtataataaaaagcttgtaataaaagcagaaaagaaagtaactaaagctgctaaaaaactgaaacatgggtcaccaccaaaagaagggttaggttttttgagtcatattgtagggttatttggacaacgattgtattttatcaataaaacaaatatgtatacagataaactaaaaattaatactgaggaatgtattgtatgtggtaaatgtgttaatttatgtccaatgaagaatctagtaattaaaaattgtatgattgttgcaaatgggcaatgtacaatgtgttatcgttgtgtaaataattgtgcaaaaaaagcaattacattgttaggtaaaaaagttgttgagcagagcaatattaaaaaatatatgtaagaaatttaaagttttattgaatgtaaattgatgtatattttatgttggaaagagaggtcaaataatggaatactacatagttgattcatttgcaactaaactatttaaaggaaatcctgctggagtttgtgttcttgacagaataatacctttagagttaatgcagaaaatagcagaagaaaacaatttaccagaaacagcatttgtagttaaaggtaaaggaaattatgaattacgatggtttactcctaaagcagaaattgatttatgtggtcatgcaactttagcagcagcttatgtaatatcaaattttattgatgttaatgtaaaaaggatagatttctttactcaaagtggaaagcttgaagttacacgaaatggaaatctatatgaaatgatatttccagaaataatgcctattgaaatagagttatcaccataacaagctaatttgataggctgtgtaccaagtgctgtctattcttcaagagatttaatcttattgctaaacagtgaacaagaagttataaattataaacctaattacgcacaattgcgtaaattgacagactggttaggtataataatcacaccacaaggaagtaatacagattttgtatcaagatatttttgtccagaattagattcagaagaccctgttactggttcatcacattgtaattttattccatactggtctgaaaagttgggaaaacacaaaatggtagctgctcaactttctaatcgtggtggtataattcagtgtgaagtgttgaaggataatactgtaaaaatttctggtgaagcagtcttgtttatgcagggaacaataaagattgatatttaaataagtataataactaatttattatgaaaaataattaattttcttagtgttaacaataataaagtagagttaaaaagcttgatttcacttaaatcaatatgatagatgttgatactaagattgacaagcatgattaaaaaagataatatttaatctataaagataaaaacacagtctggttggtagtccagacgcagcaatagctgtcagtaacctgcctccttggttgtccgttctttagaaagtaatttaaggaggaactagcgatggacaaaattagtggaaaattaacagtcttatttgaagaaccattttgggtaggtatatttgaaagacaagatggtaaaaaatatgaagcatgtagggtagtttttggagcagaacctaaagaagtagaagtgtatgaatttatacttgaaagatttttctcattagattttggtagcattaaattagaaaaaaatgtgaccaaagacaacattggatacaaaagaatgcagagaaaagtaaaaaaggaacaagaaaaagaaactatagggactaaggctcaaaatgctcttaagcttcaatatgaagaaagaaaacaggatagaaaaaacctagctaaaaatagaaaagaagaagaaaaagaaagaatatttaatttgaaacaagaaaagagaaaagctaaacataagggtcattaattttaattaaatatctttttaataattgctagaaaaaggtgtataaagtttttaattttatacaccttaatttattgaaaagaataaggttttatatttcaattactttaaaatataaaaatatactaataaaaattgtaaaaatagtataaatggtataccaaatgtaaatttaatgtgtttagttttatgtctaaaagaatacattccaatcatagaacctatactacctccaattactgctatagacataagagtagcttcttttattctccattcgtttctaattgctcttttcttatctatgtacattgaaaagaaagcaatagaattaatcactataaaatatattagaataaaatttttcacagtcttgcctccataaaaatatattatacattataaaacaagatatttgttttggaaagttaaatttgtaattagtacatataaaatatctgataagaataaatataatattaattggaaaatttaaaaaaattaaacaattagcaaatagggggtatatttataagacacaaagtgataaaatctatttagaaaataatgtaaaataacaggaggataaagcaaaatgaaatttatagtagaaaaagaagtttttgataaattagaaaatgtatgctttggtgtagtagttgcaaaaggaatagataatactaaagaaatagaaagaataagcaaccttttagatataagtatagatagagtagaagattacttcaaagataaaaaagtaaaggaatcagaagaaattataccatatagagaggcatttagaagtctaggcatgaacccaaataaatttatgagttcgatagaagcaatgacaacaagggttgctaagaataagaaacttcctcatataaatcctattgtagatttaggaaactctatttctttaaaatatttacttccaatgggtgctcatgatatggattttagaaatgatgatgtatatgttagattttctaaaaaaggggataaatttgtaccatttggagaaactgatgttgaattaatggaagaaggagaattaatttattcagttggagacatggtaaaaactagaagatggatatggagacaaggagaggaaggaaaaattactaatagctcaaaaaatatattttttcctatagatggttttactgatgctaatttagataaggtaatgagtgcaagagaagaattagcaaaattgttaaaggaaatatttaattgtgaaatcaaagtaggttttgtagataaagataatcctgaaatggaaatataataagttgttgaatacttgttaagatattatatttacttaatgatgttaaaaaggtattaaaaaagaaaggtcgtagtaaatttgaaaaaaactataataaagaatgtaaatccaatgattgaaaataagtttataggactttttgaaatagagtataaaaacaaattagatgaagataaggtttggatggtagcatcaagaaaaagtagtgagcaattaaaaaatatttatttgaagaatgaagaagatagtgtagatgcagttgtaatagttgggcttcataaaagtagtaaaaaattaattttaataagacaatttagagtacctattaatggatatatatacgagttaccagcaggtcttgttgatgaaggagagtctatagatatttctgttgaaagagaacttagagaagaaacaggacttactcttttagaaattaaaaaaaataaaagtattgataaagtttatttatctcctggaatgagtgatgaatctgttgcctttgtttattgtatatgtgatggtgatataacagatgaatttttagaaccagatgaagagattgaagcgcttttaatttcgcaagaagatgcaaaagagattttacaaagtaatcataagatagacacaaaagcatttttgattttacaaatgtttgtgagtttaggagctaaattatttgaatagatatatagaaaagaggttatatagaagagtaaaataataaagtttattttacttgtataaattataatctctttttttatacaataaagtataattttgtgtatttttaaataagttacttgactcttaaattttcataatatgttataaaccaatttaagatactacaataattaaaattccaaaattatttagcatatttgcaattaaaatgagaaaaggtaaaggctgaatgattgaaaaatttgatgtaaaatagtagattagtttaatattatagtttgtagggttaaaaattagaaattgtaaaggagataaattctatgaaaaaattagttattattttaattagtatcattagtgtggttagcttgacagcttgtaaaaaaagcaatgaaagtaaatataataatttaaacaacaaagaatcaggacaaacaaccattgaaatggacttagataaaaattatgatacttcagacccatttgttaatgcacgtttgttttgtgtgtctaatgatatagatgttttagacacagagatttcttttaaaatggatggagatagtggtattgtggaaataaaggacaataaaacagatgaaactttatggagtaatacatggcatggaagcgttgataatgatacattcgcaatttctctttctaatatacaaaaagagaaagagtatgctatatgctttaccggaattaaaataaatcatgcagttgtaaaggttacttttgaaagcaatttagttaaggagaaagaaaaaccctcaaaataaattccagcttgtctataacttgatattcagtacataaaagcagttgatatttatgattgactgctttttcctatcaaaaaggataggttgtgcatttttacttgaaatagtttatgcacatcaaaagttggtgagcatgatattggaaatggtaagcatgaaatcttgataacacaaggaaataaatttaagttttcaattaagtatatttccataatttagttaacaataagctaattattatttatattttgatatataaataataattgtggcaaattttaaaaaatcatatattttttgaactaaataaaaatttgtttttattattttaaattagaggagattcttgaagatatattatttttaaaaataagtatagtttaaaaattcaaaaaaaagatggcaaaatatgtcccaagggacattgagtaaaataaatgatttcagcttatttacactaaaaagtacatactaaatgaggggtgaaataaagaaaaatgatatactaattgtcttttgataataaaaaaacatggaatttgattatttaatcaagaaaaagtattgaacaaatgatttatttagtgtacaataatcatgtaaaaacatagtaatggagggagacatttcataatgaaaattaaggtaggaatgaacggatttggaagaataggaagagctgtattaagaatagctcaagaagaattaggagataatatagaaattgtagccataaatgcaagagcaacaacagaatctttggcacatttatttacatatgattcatgctatggaacttttagaggtgaagtagaggcaaaggatgaagacactctagtagtaaactctaaagagataaaaatattaagatatagtgacccagaagaattaccatggaaagaactgggggttgatatagtaatagaatcaacaggattatttacacaaagagaaaaggcagaaaaacatattaaagcaggagcaaaaaaagtaattataacagctccaggaaaaaatgaagatataactatagttatcggagttaatgagaaagaatatgataatcaaaagcacaatataatttcaaatgcatcttgtactacaaattgtctagctccttttgctaaagtattggacgaaaaatttggtatagtaaaagggttaatgactacagtacattcatatactaacgatcaaagaatattagataaaagccataaagatttgagaagagcaagagcagcggctgaatctataatacctaccactacaggagcagcaaaagctgtgtcaagagtactaccacaattagaaggaaaattaaatggtttttcacttagagtaccaacaccaacagtttcacttgttgatttagtgtgcgaacttaaagaaaacgttacatctgagcaagttaactctgtgttaaaagatgctgctgaaggagaattaaaaggtgttttaggatattgtgacaagccacttgtttctatagattataaaggagattcaagatcatctattatagacgctctatccacaatggttatagaagacaatatggttaaggtagtttcttggtatgataatgaatggggatattcttcaagaactgttgacttagtaaaatatgtagctgaaaaattaaaataatatatatttcttaaagcaaattttaaaaaaattttttgaaaaaattatataaaactaaaaaaaaagattatgaaaaatattgaaggaaaaattttttcataatcttttttctttcatgcaaaaagatacaagttacaacttatatttgcatattaggtcgttagagaagtatatatatatttagtaaggaatcatactttttataaaatgaaagataagatgtcgaaaacttgcataaatctgaaaaatttttattattaaaatactgattttcattttaaaaatgataaaaaaatgacaaataaagttgcaaatagtaatacttataagtataattaaaaaagagaaaaggttttgttaaactttataacaaaaaaagaagggatgattcaaaatggagaagttaacagacaggagacaggttaaggcagtaagcatggaaaccttcattttcctaatattactagtagttggttttgggtatgttggtagtattatgggagcaggaatgatgttcaaagtaataatgagtacagcacatgctttactattggagacagttttcttaattatggctatggcagttcttgcaggcgcattaagcgcactactttcagagtttggagtaatagcgttaattaataaaattttcgctgtatttatgaagcctttatatggactacctggtgctagtatagcaggagctataacaacttatttatcagataatccagctattataccttttgctaaagataaaacattcacacagtattttaaacaataccaagttccagcattatgtaacttaggaacagcctttggtatgggacttatcttaacaacatttatgatttctcaaggtacagaatatgtacttccagcattaattggtaatttaggtgcaattataggtagcgtcataagtgttagaataatgttgacatttactaagaagttttataaatacaatccggaagaagataaagcaacaggaacattagagaaaaaggatgaatttagagaaatcagagaaggaaatgtatttcaaagagctttagatgcaattcttgaaggtggtaaaatgggggtagatatgggaatggctataattcctggagtcctagtagtatgtacattggtgatgttattaacttttggaccatctacagaccctgttacaggtcaagaagtttatacaggagctgcatatgaaggaataaaattacttccagttattggagataaacttggatttatattagaaccattatttggatttacatcaccagaggcaatagcattccctataacttcattgggagctgttggtgcagcaatgtctctagttccagagtttataaagtcaggagctataactcctaatgatatagcagtatttacagctatgggtatgtgttggagtggatatttaagtacacatattggtatgatggatgcattaaatgctagacagttggcaggtaaagctattctttctcatacaataggtggtttatgtgcaggagcagcagctcactttatatttacactcgtaggataaacgtaatcagctaagataaaaaataatatacaaaaaaatggttgttgatatgtaataagaatttacatatcaacaaccatttttttctgactaaagataatttataatacataaacattaagtggatattagacttaagttatatttatgtaaaaagtaacaaaaatctgtagaaatttatgacaaaatttagtacactaactatatgttcttatttaaaatttaaggttagaattaggaattacctagtagagtaagctttgattaataaaagaatcataaaataaaaatattagtcataaagattataaataacttacttaaaataaagccatagaacttacaaaaattaaaaaagcatataaatatggaggggtacaatggatgaattatttcatataggaattgatgtaggttctacaacggtgaaggttgtggtacttaataatagtaataatatagttcataaagaatatagaagacattattctgatgtaaaaaaatcagttaaagaagtactaaatggtatatatgaaaaattgggagatataaatactaccattataataactggttcaggtggaattggaatatcaaaaaaattaggtgtaaaatttgttcaggaagttatatctagtacaaaatcaatagagtattttcatcctgaaactgatgttgtcatagaacttgggggtgaagatgcaaagataacatatctaagtggaggaatagaccaaagaatgaatggaatatgtgcaggtggcactggagcattcatagaccaaatggcatcacttttaaagacagatgccagtggattaaatgaacttgctaaagggtataatgttatatatcctatagcttcaagatgtggtgtttttgctaaaacagatattcaacctcttataaatgatggagccaatcagactgatatagcaatgagtattttcaatgcagttgtcgtacaaactgtgagtgtcctttcttgtggaagaaaaatagaaggaaatgttgcgtttttgggtggtccattgtactttttatctgaacttagagaagcatttaaaagagtattggatttaaaagatgaaaacataatcttcccagaaaatgcacaactttatattgctattggagcaggattattatcagtagatgaagataatatacaactaaaatctctaatagaaaaattggatagtataaagaatattgaagatggagaagtaaatttattagaacctttatttaaagataaaaatgagtatgaagaattttcaagaagacatgaaaaagaaaaaataagttatgtggacataaattcaataaaaagcaattgttatttaggaattgatgcaggctcaactacaactaaagcagcacttattgatgaggatggaagacttgtatattcttattataatagcaatgaaggaaatccattaaaaacaaccattaaagttataaatgaagtatatgatatattaccaaaaaatattaaaatattgagttcaactgtaactggatatggagaaggtcttattaaaaaagctcttaaaatcgataacggagagatagagactatagcacattacaaagctgctaaatttttcaataaagatgtagattttatacttgatattggtggtcaagatatgaagtgcctaaaaataaaagatggagtaattgataatataatattaaatgaggcttgttcatcaggttgtggctcatttttagagacatttgcaagttctttatctatgacaatagaagaatttgcacatgaaggtatttattctcaaaatcctgtagatttaggttcaagatgtactgtatttatgaattctagagtaaaacaagctcaaaaagaaggtgcaagtgttggagatatatcagcagggctatcttattcagtaataaaaaatgctttatttaaagtaataaagattagagatttaaatgagattggtaataatattgttgtacaaggtggaaccttttataatgatttggtgcttagaagctttgaaaaactaattggaaaaaatgtaattagacctaatatttcaggaattatgggagcttttggttcagcacttatagctaaagaaaaatatgaaagtggatacaaaacatccttgttatctaaggaagagttgaataatatcaagctagaagcaagtgtaactagatgtaaaggttgttcaaatcattgtcttcttacaataaataaattttctgataatgaaatttttatttcaggtaatagatgtgagaagggtgaagctatttatggtgataaaaaaataggattagaaaagaaaaaaccaataaatttatttaagtacaaatacaatagaatttttagatacaaaccattggaaaaagaagaagcaaaaaatggggaaatagggataccaagagtattaaatatgtatgaagattatccattttggtttacttttttcaatgctatgggctttagagttgtactttcagataggtcatcaaaacagttatatgaaactggtataactagtattgcatctgaaacagtttgttatccaggaaaattagttcatggacatatagaaaatttaattgcaaaaggtataaaaaatatattttatccaagtgtaacaaatgaaaataaagaggattcaaatgcagataattattataattgtcctgttgtaatatcatattctgaagtaataaaaaacaatgtagagaatataagaaataagaacataaattatataaatccatttataagtctaaatgataaggaaaaattgaagaaaagactatatgatgaattatcaagacatttttctgatataaaaataactaaagaagaagttaatcatgcagttgataaagctactgatgaacagaatttatttaaaatggagatacaagcagcaggtgaaagagcacttaaagaaataaaagaaagaaatatgaaggggattgtgttatgtggaagaccatatcatatagacccagaaataaatcatggaatgccagagcttataaattcattagatatggcagtgcttactgaagactctatatgtcatttagccaatgtacaaagaccacttagagttgtagaccaatgggtatatcattcaagattgtataaagcagctagttttgtaagagataaaaactatttggaacttgttcaacttaattcatttggctgtggattagatgcagtaactacagaccaggttcaagaaatacttaatgaaaaatcgaagatatatactattataaagattgacgaaggcaacaatttaggagcagctaagataaggatgaggtccttaaaagcagctatgtttgagagagaaagcaaaaatatagatgtaaaaaatataaaggtaaacaggatacagtatgctaaaaataatcagataacgaacaaacatactatattagcaccacaaatgtctccaatacatttccaatttcttgaaaaagctgttaacttaagtggttataatatagaaattctaaaagatactgatagtagtgtaattgaagaagggttaagatatgtaaataatgatgcatgttatccagctataatagttgtaggtcagctaataacagcattaaaatctggcaaatatgatttaaataatacttctgttactataactcagactggtggaggttgtagagctacaaattatattggattcttaagaaaggctatatatgatgctggatttaaagatgttcctgtcattgcacttagtgtaaatggaatagaagatagtggtataatggataatatatcactaaaattaatcaatagactctttatgtctgttgtttatggtgatttgctgatgaaagtactatatagagtaagaccatatgaaaaagttactggaagtgcaaatgctctatatgaaaaatgggttgatatatgcaaatcttctcttgttaaagcaaaaatttctgtatttactagaaatataaaagatatagtaaaagaatttgataatttagagatactagatatcaaaaaaccaaaagtaggtttggttggagaaatattggtgaaattccatccaattgcaaataataatttagtagatatattagagcgagaaggtgctgaagcagtcgtgccagaccttacaaatttcttcttaagttgtgcctttaatactatatacaaacacactcatttagaaggaagtagaaagagtagaatgataggagaagcatttatatacataactggaatatatcaaagagtatataaaaaagcacttgataagagtgagagattttatgctccagccaatataaaaaatgttgctaaaagtacagaaccagtagtgtcattaggtaatcaaactggagaaggttggcttttaacaggtgagatggttgaattattaaatgaaggtgtagaaaacattatttgtatgcaaccttttggatgtttacctaatcacataattggtaagggttctataaaagaattaaagaggttgtataaaaatgcaaatataatacctattgattatgacccttctgcaagtgaggtaaatcaacttaacaggataaaacttatgctttctaaggcttttaaaaatatataagatttatattttgatatgttaaaagttaatgaatttaaaaatatactctatattaagtatctataaaaaagagttatcctattttttagggtaactctttattagttaaaaaattatatgtatactgatattaaaggggggaagtaatatgagtttagtatatgatgtttataaatcaaaattaggaaatttgtacatattaagtgaagatggttttatagttagtgtatacataggagatgaaaaatttaataatttaaaaaatgaatgtattaaaaaaggaattgatataaagataagtaaggaagatttaaaggaagcaataagccagatagatgattactttaatggaaaaagaaaagtctttaatttaaatattcgtattgaagggactgaatttcaaaaatcagtttatagggaaatgttaaaaataccttatggagaaacattgtgttattcagatatagcaagaaatataaacaatccaaaatcagtaagagcaataggacaagcaagtaaaagtaataaaattccaataataataccttgtcatagagtagttggcaaaaaaaatattggtggatatatggggaatcattctgatttgaaagagatactattaaatttagaaagacagagttaacttagaaagaaatgtttttattgttaatatttgatataataatagtaaaaagaagtattttttacaaaaacaatgaagaatttattttaatttacaaaaatgagggggaattttaatgtgtgataaagttatagcatcaaaatatcatgagaagggatttaattgtgcagaatcagttataaaagcatataatgaggaatttaatacagatataccagtttgtttaggaagtggactgggttcagggtgtggggttgctagtttatgtggtgcagtaaatgcatcaaatataataattggatacgtaaaaggcagaaaccacgaagatgaaagtactaaagctaaagtatatgctaaagatttaactacaacagtaagaaaagagtatggttcagagttatgtatagacctaaaaaaagatttagttgcttgtagagaaataatggatttcgcatatgatagtctaaaggaaactttaaaaaaagaattataagaaaataagctatcaagtataaattatttgatagcttatttttatagtcgatactaaataaatcaaatatattttagaattattatttgtaaataaacagcaaataattttaggatttttatttaatatagtttttatttatatttatttttgaatatgttatactttgtttaaataaatatttgtaatgagggagatgagaagattgaagaatctcaatttacttattaataaattatattcaaaaaatcataatgaagcatataaaacttttttattcttagaaaatgaaagtttaaaatcaaatattacatattgtttttttgactcattcctagaaatgattgataacgaaaactcatatattcgaacaaggggattgttattaatctctgcaaatgctcagtgggatattgataataaaattgaaataaatatagatagtatactaagtcatatcgtagataaaaaaccttctgtatcaagaatgtttattaaatccatacctaatattacaaagtataaagaaaatcttattaatcgcataaaaatggaattaagtaatgcagatataagtatttataataataatatgaaaccattagtagaaaaggatataaacgatacattatctaatattagttaaatattaatatagaaattgaatattatctagttacaattatttataactaagataataaaacaacaatggtgctaatttatatgtataaattaattatgaaaaatttatataagtaaaatatattaacataaaggtaaaattttgtatactaaaagggaatatttacagtttaatggcagttttaaaataataaattaaagctgtcatttttatttaaaaatttttagaaaaagtacaatagtgttaatgtgtgaattagataaggtgtatataataatttagatgatatgatataaaatatgttgtaaattaaatgttttctttgacaatatatacacaaggatgataatatctatatgaataaaagatagtgtgtaatttgataatatgtaattataacattatgatataattacaataaagtatgtaataatctgtagaaatttcaagctagttatctaagttttcggataactaaatctaaacggaatacataatgtattaaataaatgatgatactaaaatgatactatttttatagaaatttattgaggtatataattgatgaaaataatatattaaattatataatatattgagttttacataaaagcgaaggtgggaataaaaatgaaagaaattgctgatgctataacatcagagtatttaagctatggtatcaatgaagatattagtatctatgaaggtagattttgcatatatttagataaaaaatatagatgtaatgggaaaatttattataaaatgacacctccaatatctataagttttaaagcagacataggttgtgttgaagagatagacaatgaagatgacaatttagttttggattatgataatgctattcttgaagttcatggatacaaaattatttctataacaataaatactttaagtgaatttagtgtagaaggttatatcaatgatgactgcataaaatctaagaactcctatgttgaatatgtagattttaatataataaacttagataaaatacctggaaaactaattaaatacaatgataaggtatacgcaggtagaattgaatttgatataaatgattatgttgtaactatagacaagcgatatgattatagaaaagaattaaaatcagaattaaagtctaaatctggagcaataataactcatataggtaggattagaagaaaagatggtagaatttttagaacaaataatacaataaatcttttagatagaatatcaacagctttgagttttatgtgtggaagatatgtagggttttgtttggccaaagggtatagaagtggtaatgaagtttatagaatatggaatgaaaatcaaatatctccttttagatatgtaccaacatggtcagatacactttcaaattatcataatatggaaaaatatataagccttatgtgtaaaaagctagaagatttttattatggttctgctataaagagtgttgttgattggtacatagaatctcttggaagtgctaccatggaaaacaatataatatctgtacaaattgcacttgaaactttgtcatatgtaattctagtggaacaaagtaagatacttacagatgaagcatttgactgtaatttggcatctaaaaatataagactcttacttgatacatgtaagataccatatggtaaacatgaattaaatatatttgataatataataaaaaataaatttgatgatggagtggatttagttatttatttaagaaatagcatagttcatccaagtagaaagactcatagagctgtgttagaggttgaagatatttggaatataatttcaataggaacgagatatattgaacttgttttactctttattttaggttatagaggagaatattcaaacagattagtagaaaggtgttatggtgaagtggaagttgtaccttggaactagatttttatatttattttaaaatatatattgacatatattgccttatgctataaaatcaatatcataataataattcagaataacattaaatgctaagaaaagaaatagtaaaggtagttaatcttaaacagagagtttccgattggtgagaggagcaatagattttactttgaacacatctttgagcaggactctgaaagagtagaaatactttattaggagatttccggaatccttgcacccgttatagtgctagagtataataattttattgtacttaaagaggttagtgtcgtgaggcattaatgaacagaggtggaaccacgagagttaactcccgtcctctagcagaagctagaggcgggagttttttaatataattttttaagcgcgcagagaattatattgcaatagatacactttttaaaaaataatcaaaatattttaaaaattaaaaggcgagggagaatattatgaaaaatatattaaaaaaagtaggaatatttacaattatgttaggtttattaggtggagttgtaggttgttcaaaaccagataatgaaaaagataaggatgcttcaaaggaatctaaaaaagaagtagttgtagggtttgataatacgtttgtaccaatgggatttttagatgaaaagggagatacagtaggatttgacgtagacttagctaaagaaacatttaaaagacttggaatggaagttaagtttcagcctatagattggtcaatgaaggaaactgaattaaatgattcaaaaactgtagatgtattatggaatggatattctataacagacgaaagaaagaaaatagtatcatatacagaaccatatttacaaaataaacagataatagttactctaagtgattcaaaaataaattcaaaagctgatttaaaagataaagaagttggaacacaacaaggttcaacagcacttgatgcagtggaaaaggataaagattttatgaatagcttaaaaggtggagcaccagttctttatgatacttatgataaagcacttagagatttagagataggtagaactagtgcagttgttggtgatgaagttttaattagatattatatgggacaaaagggtgaagacaaatacaaggtattaaaagacgattttggattagaagattatgttgtagcaacttctaaagaaaatccagaactttgtgagaaaataaataaaacattaaaagaaatgaaaaaagatggaacttttgacaaaatttatgataagtggtttaaatagaagataagttagctgttaagaagggggcactaaaggcatgttacaaggtttagagatagttatagcaatgttttgtataacattgatagtatcaattccattggggattggagttgcatttttaagattatcaaagaataaattagtaagtggtattacacaatgttatatattgataatgagaggtacacctttacttttgcaaatgatagtcatattttacggattacctcttttaggaattgtatttgacagatttacagctggagtagtagctttcttcttaaattatgcagcatattttgcagaaatatttagaggtggaatacagtcaatcgatagaggacaatatgaagcttcaaaagtactaggatttgataaatttactatgtataagagagtaatctttccacaagtttttaaaagaatactagcacctatttcaaatgaagtaatcacattagtaaaagatacatctttagtatatatattaggattaaatgatattttaagaatatctcaaatagcaatgaacagggaagcaagtctgttaccattatttgaggcaggagcgatatatcttatatttgtagctatacttactaagggatttgaattacttgaaaaaaaatattcttattatagataaagttacaatattataggaggaggttttttatatgttgaaaatcaaaaacttaaataaatcatttaaaaaaaatagagtacttaaagatatttcttttgagttagaagaaggtcagattggagttttacttggtaagtctggtgcaggaaagaccacaatattaagatgtataaatggtcttgaagaatttgatagtggagagattataatagataatgaggtaataaaaaataagagagatatggcaaaaatacgaggaaaaataggtatggtttttcaaaatttcaacttatttcctcatatgacagtccttgaaaatataattgaatccccagttaatgtttttaaagttcctagaaaagaggctgaagagagggctagagaacttttaagattagttgatttagaagataaattaaattcttatccatttgaattgtcaggaggacagcaacagagagttgctatagctaggtcatgtgcattgatgccaaaagtcctttgttttgatgaacctacttctgcacttgatattgatactattcaaagagtagtcaatataatgaatagacttaaagacaaaggtatgacaatattaataattacacatgatgttgtcttctcaaataatgttgcagataaaattataagtataaaagatggtatagtagaaaatgttcaaataaaagaaaaaattgtttagagttttataaatataaactagggtagaattttataatataaataaagggcaagtaaaatcaaatatactatgcccttttgttatctcaaaatttaatcttatattttatgtttaagttacattataatttataataaaaataaaaggactatttaaatatataatgtgaataaatgtttaataatttgaaatatgataattttttatgttgaaagcttataatgattatgatataaattggttatagtatacaatttatgggtataacaataaaaaattagaaaggaatttttataaaatgattaaattatatggatatacaaaatgctctactgttaaaaaagctaaaaattggcttaaggaaaataatttagaatttgaagatatagatatggttcaaaaccctcctagtaaagaggagttaaaatcaatttataagactagtggatatgatataaagaaattttttaatacaagtggtatgaaatatagagaattgggtcttaaagatattgtaaaaactgaatctgatgataaacttttagaaatattggtaagtgatggtatgcttattaaaagaccattacttttggatggtaaaaatgtattattgggctttaaagaagatgtatggaaaagtactttgctaaaagaagattaggaagagataggtgtgttgattaaaattattaattaatacacctataaatttatgtattaaatctaatctttataaatattaattagcaaattcaaatcaaaaaaattcatatcaacaaatatattacttcttattacaaattatatcatatgttttatattaaaatattataatattacaacgaattgttacaaaattacttattattaaccatgaacatttgttttgtgctatcatatttatataagggaattgtcataaaaaatatcttgttcatacagttttatatagaaaaaagaaatgaatcttttctttatataagtatattttgtaaattgcctctatatttatagtttaaataatagtggttttaaaaatctgacaacaaaaataaaactttcaaaaaattaaatctaaaaagaataggagataaatatgagtattgaagatttatatgattttgaatgtgttcctttgaacaatgagattgatattgatgttttatttgaaaagatgatagaagatggaaaagaaaaagaatatacaccaattatagtcattgatgaaaaagtagggctattaagaaaaaatatagatatgattactaaagagtatggttctcttgaaaactatagagagtattgtttaacaaaatataatgaaattgatgtaaatcaattttttgattttaggaagagtgagatttcagaattattaaaggagctaattgatttagaagatgatttttatgattataaacattttagaccaattataaatatagatatatttcatgaatataacaaagtttacatagctaaaattccaacaattaaaccatatgaagtatttgcatacatacctattggaggatttaatgattgtcctagagatgaagaacatatagctattgcaaaatattggtatgaaaagcatggaatctttccaatcgcaattggatgtgatacagttcaatattctgtaaaaaatttaactaaagatggtaaaaaatttgatgacttatgtattgaattagtattttattgtgaggatattattatacaagggtatgaaaccttaaaggctcttaaggatgtattaaaacgctctacaatagtgcttttttggtgggattgatattctatcatttagatagtattaaattgttagtcaccaagaatccacttactttagttatggggagtgtgtcaaactaggtttttatacacagtgtagcatagtaatatgtttaaattacaaaggttaaaaaaatactttaatatttttaatattataattaatagatttaaaggtaattataatttataaaataaatactttatatgttataatcattaagaatgtaaaaaaataatatatagttttatagttcatatttttccagatatggaggtaaattttgtgaaggaaaaagaaaaattagataaattaaaaaaaatgttacttgaattaggcagtgttgtagttgcttattctggtggagtagatagtaattttttgcttaaggtcgcaaaagatacattaggtgaaaatgttatagctgtgaccattcatgcaatgatgcattcaagtagggaaattgaagaggctaaacaatatactcaaaattttggcgttaaacatatcatattaaatatagaaaactttgatttaaaagaatttaaagaaaatggtgttgatagatgttatcattgtaaaaaatatatattctctaaaataaaagaggtagcaaaagaacataatataaagtacatagtagatgggacaaatatggatgatttaggagactatagacctgggcttaaggcattgagtgaattaggagtgattagtccattaaaagatagtagtttaaaaaaagaagaaattaggtcgctttcaaaaatattaggattaaatacttttaataaaccatcatttgcatgtcttgcaagtaggattccttatggagttgagataacagatgaaaatttaagaatagtagaaaagagtgaagaatatctattcaatttaggtttttctcaatttagagtgagaatgcatggagagatagctagaatagaagttgggcaggaagaactaggtaaattttttgaaaataacaattttaataaagttgatactaaattaaaaatatttggctttaaatatgttacactagatatgtcaggatataaaatgggaagtatgaatttaaatgtgtagattattttaaaaataaataagttttatagttaatataaggaaacaggaggttttatgaaaaattatacattaatatcgccatgtttttttggaatggaaaaaatgctggctagagagattactaatttaggatatgaaataataaaaacagaagatggaagaataacatataaaactgatgagtttggaatagcaaagtcaaacatgtggttgagatgtgctgaaagagtacatcttaaaattgctgaatttgaggcaaaaagctttgatgaattatttgaaaatacaaaaagaataaactggtctagatatataccttatggagctcaatttcctatatcaaaagcttcctctataaaatcaaaattatacagtacaccagatgtacaagccatagtaaaaaaggctatagtagaaagcttaaagaaaagttatttagaggatggtttgcttaaagaagataaggagaaataccctatttttgtatttatacacaaagataaagtaaccatttctatagatacaacaggagatgctttgcataagagaggatatagagaaaaggcaaataaagctccaataagagagactttagctgctgggcttatttatttaactccctggaaagcaggtagagttttagtagaccctatgtgtggttctggtactatattgattgaagctgctatgattggtataaatatggcacctggcttaaatagagagtttatatcagaaaagtggagaactcttgataagaaaatatggtgggatgtaagaaaagatgcttttaataagatagataatgaatctaaatttaagatttatggatatgatatagatgaagaatctatagatatagctagagaaaatgctgaaatagcaggtgtagatgaatatatagagtttaatgtaggagatgcaactcaatttaaaagtgaagatgagtttggatttataatcactaatcctccttacggagaaagattagaagataaagacagtgttaaacagttgtataaggagcttggttatgcatttagaaaattaaaaaattggtcgtattatttgataacttcttatgaagactttgaatatgagtttgggcaaaaagcagacaaaaaaagaaaattgtataatggtatgttaaaaactaactttttccaatatccgggtcctaagcctcctagaaataataaataagttttacatgatttatttgtaaaatataaaattttattaaaataagtaaaacattatgatgccttgaaacgtctaattattgtgaggagatttttgtgaacaaatttaaagatttataggattaggaggagttaaatgaaagtgttaaagcttattactgtagtagccctgatgatgttatttgttactggatgtaatataaaaactgaatctccagaacaattagcgaagatacctgactatgatgatacaaaaaaagtattgtatgatggtattgaccagttactaaaaccagattcatctatgatattgccttctaatacaaaagaagtaggaaaaataaataaggtagatttaaacagcgatggaattgatgaattagtagtatttgaacaaaaagaagatttaagtaataatgtgagtcaggtagggtttgtaaccttgagttacaatggagaaaaatacgtacttggagaccattttttagaaaatggcgaatcaatagaatatgctaatttttatgatttggactcagatggatataaggaagttatcttattggttaaatccaaagacaaaacgaatatgcatatatataaagtagtagataatgaaataacaaaaatatatgacttggatgcatcatggcttcaaaataaagaagattttaatgacatgaaagtaaaaattggatatatagatggagatgacaagttagacatattgatgcttcatttgaataataagactaatgaaatgtttgcaagtgttgcaaattttgatgggaaaatgaaaatcaaagattctgttaagtttgaaaatgtaaaaaacttaagtgaattatatacaacattaggtaatgttgcttcatctgttggaaattcttctgcagctataaaaggtattgtacttgatattcctatattgaaagataataactatattacgcagatactttatatgaaagatgggaaaattaacaaagcttttagtgattatgataaaactattactaaatcttattatatacctgtagatgatattgacaaagataagattatagaaatacctatagttgcaggcagtacaggtaataataaaaatacttatagttctaaatcatctgcaactataagttggtatagatggaatggaaaagaaggtgctgactcaagtttaatatttacaagtcagatatattataattataaatataattttaaattatttattccaaataatttatttgataaaatacttgttgaacaggaatttgttggagaaaaagcagtatttaaattttactattttgactattcagatcgtaagaatttatttaatatagtagtagagagtaaaaacaaacttgaagatagaaaaaatacaggtactcaaaactctattgtacttcaagagagcgatgaatatactttcttactagttgtaaacaatgcaaatgaaatggataagctagatatgactatagacgcattaaaagaatatttctcattaatatatggttaatattatactcaattggaggttttattttatgaaggaaaagatacttatactagaagatgaaattggtattagaagttttgttagtataaacttaaaaagagaaggctatgaaatagttgaggcaggtactggaagagaagctatagaaaaaatgacaacagaaaatgatattacaatagctcttttagatgtgatgcttccagatataagtggtatagaagtatgtaaatttataagggagaattttgaccaagtaggtataataatgcttactgctaaagctcaagaggatgataaaatagaaggatttatttcaggagcagatgattacatcataaaaccatttagtataaaagagcttttagtcagggtttctgctcttcttagaagagtagcaaaggatgattcaagtgttaagtcgagtgaaatagtttctccaccatttatacttgatatagacaagagaaaattatttaaaaatggaaaggaaattgagcttacaccaactgaattttcaatagtgaaatatctaatatcaaatgctaagcaatcgttaagtagagaccagatattagacgaagtatggggaactaactatttatatgattttaaaatagtagatgtaaatataagaaggataagaaataaaatagaagatgacccatcaaagccaaaatatatacaaactatttggggttatggatactgttttagaaaggaagaataatagtgttacattttgaaggtctgagaaaaaaagtaataaaaaactattttataataattattataatggttactctgtttgaaggattgttcatgttttacatacaaaactactattatgattctgtcaaacaactacttgaatctgaaataaaatatgctgatgaatataatgctattacaatggaaactacaagttttgagaaaaaagtaaaaaatatatttgataaacaaccattaactaaaaattcagaatttggaatttcaataatagataaagataaaaatattatattagaccaatatggttttaaaagtaaagaaaaagcaaactatgaagatgttaacaatgcattaaaagatataaaaactaaaaatttaacaccttatacttatagaataccagatacaggggagcatgttatgagtatctccttaccacttaaggtaaataatataatagaaggtgttgttagatatacagtatcattagatgctattgataatgcaatattaaagcaagctacatggcttatattagcaggaatatttatacttattatagctatactaataagtcttaaatttgctgagactcttataaaaccattacgagagctaaagaaatttgcaaatgaattggctgtaggaaattataatataaaattagaaaagatgaagattgtagatgatgagattggtgatttagcacagacatttgaacacatggcacatgagattgacaaaagtgaaaaattaaaagaggaatttatatcatctgtatctcatgaactaaggactcctcttacatctataaaggggtggagtgaaaccttaggttatgaaagtataacaagagaagaactagacttaggtttaggcattatacaagatgaaacagaaagacttataaaactagttgaagaattattagacttttcaaggctttcttcagacaggataaaacttcatgttgatatagttgatgttgaaggtttaattgtaggtgttgtaaatcaacttaaagttaaagcagctgaaaaagatatatcacttttatttgaatttgaaaatgaatttatagagaacattcaaggagataaaaatagattaagacaggttctcataaatttaatacaaaattcatttaaatttacgagtcaaggtggttacataaaagttgtagcttctcaagatgaagagataacaaccatatcagtagaggataatggttcaggtatagaaaagcaaaatttaaataaagtgttagataaatttttccaagaagattataataaggctggtagtggattaggattagcaattagtaatgaaattgtaaaacttcatggtggaagaatgaaaatagaaagtgaaaagaatgttggaacaaaaataacttttaatataaaaaataaatttgctaaacaagcataaattcttagaaagaggattaagatgagaaacataaaaatgatagtagcatacgatggttcaagatataaaggatatcaaaaattaggtgacaataatatgactattcaagaaaaacttgaaaatgttttaagtaaaatgactaatgaaacagtggagataatagggtctggaagaactgatatgggagctcatgcaagaggacaagtggtaaattttagaactaattgtatggattctttggataaaattcaaaaatatttatatgaatatttaccagaagatatagttgtaaaaactgttgaagaagttgatgaaagatttcattcaagatacaatgtaaaatcaaagacttatatgtataaaattgacaataataagtatcacaatccttttataagaaaatatgctactcatgtaagtaaaaaattagatttagatagaatgagaaaagcaagtgagtatttagtaggagaacatgattttactagttttgcttcttctaaatctaagaaaaaatcaaatgtaagagaaatttattctataaatataaaagaagatgataatgttatagaaatatatgtagaaggaaatggatttttgtacaacatggtaaggataatagtaggtgctttgatagatgttggtctaaaaagaagagctccacaagatattaagtatatgcttgaatcaaaagatagatgtcaatcatcagatactgcaccagctaaaggactatgtctttggaaagtaacatattagtcaattatataaaactctctttaaaataaaaataaaataaattatatagttgacataaatggaaaaataaactattatatattttataagagagatataaaactttatatttaaatcctgtgagaaagagagtaacttctatgtgttttatagagagctgaggatggtggaagctcagcaaataagtattagtgaaaagaactttggaggatactaattgaatttagtatgttagtaggtaatctcgccttaagagaaagagtggataagtttatcttatcaattagagtggtaacgcggatatatttcgtctcttggtttttccaagaggcgttttttaatatatttaattattagtgtttatctggtatgttgaacatttactaattgattagctaagtttatcaataagagtggtaccgcggatatttcgcctcttagtattttaaaatactaaggggtttttttagtattaaaatgattttatgtgagtctaaattctcagagtcattcaatattaagaatttctataaaataaaaattataatttaagattgggaggaattaaaaatgaaggaaaaagtagtattagcatattcaggaggacttgacacatcaatcataataccttggttaaaggaaaattatgaagatatagatgttatagctgtttgtggaaatgtaggtcaggaagataaaatggaagatgtatatgaaaaagctttacaaagtggagcatcaaaggcatatgtggatgatataagtgaagaatttgtaactgaaactatatttaaagccgtaaaagcagaggctaaatatgaaggaaaatacttattaggaacttctttagcaagacctataatagctaaaaaattagttgaagttgctcataaagaaggtgcaaaatatatatgccatggatgtacaggaaaaggtaatgaccaagttagatttgaagctacaattgcagctcttgacccgactataaaagttattgcaccttggagaatttgggatataaaatcaagagaagatgctatagactatgctgaaaaacataatataaaggtaacagcaactaaagctaaaatatattcagtagatgctaacctttggcatgtttcaacagaaggtggagatatagagcacctagaaaatgaacataaaaaagatgtttataaacaatgtgtagacccagaagatgcatgtgatgtagctgaatatgtagaagtttactttgaaaaaggtgtacctaaaaaagtaaatggcgaagaattatctccagttgcactgattcataagttaaatgagttgggttgtaaacatggaattggtgttatagatatagttgagaatagacttgttggtatgaaatcaagaggtatatatgagactccaggaggaacaatcctttatgaagcacataatattttagaaagtgctactttagacaaagatacattacatttcaaacaaatggtatcttataaatacggagaacttatttacaatggactatggtattgtaaattaagagaatctatagatgcatttatggaacaaactcaagataatgttacaggaacagtaaaagttaaactttacaaaggaaatataaaacctgctggaatatttactgaaaatgctctttatgatgaaggaatatcttcttttggaaatagtgaactttatgaccacaaagatgcagaaggatttattaatttattcactttaccattaaaaatcagagctatgaaagctggaaaataataaaataaattatttaagagtgtataaaaactatttttaggtttttatatgctctttttttatttgaatttattaaattatacagtaaatagtataaaaaaatatattatagttccaaatgacttaataatgtgaaaatataagacctaaaatataaattttataaatacaatagttattgactctctcattgtaagagggtttatactgaatctaatgaaaatttatagtgaggagatagattatatgagaaaaataattgaaattaaacatcattcacatgattatgagtgtatgtggaatggtatagaagatttatatataaataaaaccggtgaatgccttccaaacgattttttctttttactgtcaggttttggttcattttgttatatgaaaacaaataaagctgatttgaaaagaatggtagctttgggagatggaaggacaaaacagatgtataaatttttagcaccaattgttggatttgaatacaaacatcatgagtttaaaaagtatgagcaagcattaaagaaagcaaaatctgaaattgatggtggatatccagttattttaggagctttagatatgtattatctaccatattataagaagctatatcataaagaacacattccttttcattatatattaatggtaggatatgatgatgaaagaatatatctgtatgattgtggtagaacagaattattacatctttcttatgataaattacgtgaaagcatgaattgcaattcccctggattaagcaaagaaaatactatttgcacaataagaatgaatacttcaaagaataaatataacattgctagagaagctattgctataaagcgtgatatgtttttaaatccatctaaaggatttttgggatataaaggttttgaaaagtttattaaagagttgccacagtggaacactgaattggataaagatgattatgataagattttgaccaatatggttatgttttttggaacagtaccaacaattccaaatgcaatcaaaggaattaaagaaccagatactgttcaatttaaaggtggatttgataaaatgagtagaatgctcaacagtattggggaggaatacaaaaacgactcttttatacaagtagctgatatttttgataaaactgctattataattgagaaaatatccaatattataatagattatttaactcaaacatgtgatgatacagaacaacttccgttattgttctctgaggtcttagagcatatgaaaacaggatatttaatcttggatgtataaaaaatatattgttgaccctaacattacgtaatagtgtaatatgaaaatatagcttgaatatattagtaggtattgatggctgtaaaattaaaatttgaggtgtggatatgagaacagtgaaacaagtttctgatttaactggaataagtgtgagggcattacattattatgatgagataggtcttttaaaaccaaataaaattacagatgcaggatatagactttatgatgatgaatctattaaaactcttcaacaaattttattttttaaggagattgatattcctttaagagaggttaaggaaataatgtcaagccaatattttgataaggttgaagctctaaaaaatcaaaaaaaattacttattttaaaacgaaagagactggatgaattgatagagcttataaatcaaactctaagaggagaaggaaatattgattttaaagagtttgatatgagcgagtattttaatgttttagaagaatttaaaagagaacataggaataagataattaaaatttatggtagtgtagaaaaatacaatgaatatatagaaagagttaagtctaatgaagagaaaattgctaaaatggctataaaacaatatggaactattgagaagtttgcccaagctataaaaacaaattttagcagtgatatattgaatttaggagaaaaatttgatagatataaaaatgattgtttaaaagaaaaacatccaaaattaaaagaattatatagaaagcttgtagaagatttaagtaagaatccttcttcaacagaccttcaagaaatagcaaaagagataacagatatatctaaaaaagattatgaaattttctctatgtatactggtgatgacaactggtattatatgattcaaaattatctagtaaatcctatgtggatagaagaagtagataaaaagtatggaagtggagcaggcaagtttattggacaagtactaaagacttatctaagagatagaaaaccaaagataaatacattgtatgaaaaacttgtagaagatttgagtagagattgttcttcaagggaagttcaaagcattgttgaagaaatagacaatgaaatgaaaagaagtaatgaattttataaaatagacaatggtgaaagatactttgattatatgtcagagctttatttacaagattctaactatataaaagtaactgataagaattatggtgatggtgcatctaagtttattggagaagcttttaagatttattttgataataataattgttgaaaatttggaagtaaaaaatatgtaagttttataaaagcacaaaaataaggatgtagattagctccatctatatccttatttaaagttattaaaatatatagtttacatcaaacttaacactttcaataatatttcccaaatatgtttttatactttcaacttcttctaaagattttaatttattttcagtataaattgctttgtccagaatattaaaccttaatcctatttcatcaaagtactcatgatttaaaactttgtaccaatggtttttttctttattccaactcgtagatattgaatcagcttctttttgagctttttcccaatcttcattttctatagatttttctaaaacagatatattgtctttatatccttctgtaaaatcatatagtttattgttaacgtaaaatccaaataatacaaataagatagtccatagtataacaaatgttgtagatttcaatattaatcaccctttttattttgaataaatattttgtcattttcatctaaaacacaaataagaacatctttaaaagtttctatgtgattagattttaaaatacccattaaccagttagtatctttttgagctatgtctagatttttatttattattctaccatccagtataagtgggataggtaaatgattaaaagctcttggaggagtactattgtagcttgatgctggtacaacacttagattaccatcagtctccaaaatagcatattgtacatcttttaggttgaagtatccttgaatcctaagttgttctaataattcatctatactaattctttcttttttaagctctttatatacaatttttcctttatctattaatacagaaggtttacctgataaaaatgaacttaattttctgctttttaatgataagaatgaaataagagtctgcatgattacaagaccagatattgctgcaacaccatttatgattggtatattattattttccattgggacagatgcaacttctgcaattaatagtgttataactaaatcaaaacagttcatttcagctatttcaccttttcccatgactctaagtgcaattagcactgttatgtataatataatacttcttattaatactactgtcatatctatcaattactcctttaaaaaatatttacacttagttagtatatcctatataaaaaatttaattcaaagtataaaaaaccttaaataattggattcaactatttaaggtttttttgataattttaatattaaattttttatggattttctgttacttttatttattttaataacagattcaacaaaactctttttatctcctaattttaagataaaatcaggatattcttcaaattcattgagttttattaatttgaaagaagaagatagatttttaaagttaatgattttagagttattcactaatacacttctttttttaaaataaatttcttttttacttatatttagtatagttaatatttgtttaagatatattattatatcttctggagttctatcaaatttgagttcaaaattttcatcttcaaagtagggaatataatataaaggtgttttgagagcaggtaatttattatataattcttcaagaatatcgatatttttaggggagttaaagaaaaagcatttacatacgttcattaaatccacagcatctgaaagtgagttatgtttaatatctccttctacagaaaaaatttttttcatattcagtaaagatatttgcttagataagattctattattgtatgtaatatgttgagatataaaaggttgaatgtcaatcatcatattaaataactctaagcatttacctgtatatttatatactctaaatgaagttagaaggccagttatatcaaaatcaccccaattatatattgtaacatcatcaaatttacaaaaccatttataaaaatcatccataacatataaaagattaggagcattattgatatctagttggttcaatttggttaaatttttacatttatttgaaagtattttattgtattttggcttaactaaagagtaataattatctattgtattaaattcgttatcaactaaaactccaccaatagaaattaattccgcaccattatattcttttggtttatttttattatcatctagtatattaaattcaaagtctataaataacttgtatttcataaatctaaagcacatcctcaggtaaattatttattgagcctaagcatcataagaatcaatagatataatgactctaaacatcaaaggttcattacaacttttatttatttcataatttaattcaaataaatcttttaagatataatttataagtattctttcccaacccatttttaaattaactttagagtctattaatatattttctatctttttaaatatttctatatttgctggtattatactgagctcaatattacttttaaacgggttagactgtaaatctgttataagtatattttttaattcctctgtaagttcagaaattaaactatcacctatgtatttttttatgatttcctctctaatttcttttaaatttagcaatattagtacctgctacttacatagtagcttttcctttccttttaatactattattcatttttgaatcttatttagatatattttaagattaaaagtctttagctatataattttttacccatttttaacttatattaacatattacaggcttatatctccaccctgcttacattgaggatggagtatattgcctattttgataaaaatgataggttgttatttgcctattcctttttctgataatttttctaacatatctttggtcattttatctaaatcataactaaacttaaagttccattcttttactgcactactactgtctagagagttaggccaagaatcagctatactttgtcttacagggtctacatcatattctatcacaaaatcaggaatatatttttttatagaatcagctatttcttcaggagaaaagctcatagcagtaatattaaaagcatttctatggatgagtttatccgctggagcttggattaaatccactattgattgaagtgcatcaggcatatacatcatatccatttttgtaccttctgctatgtaagatttatatctcttattttttaatgcctcataatatatatcaactgcataatctgtagttcctccaccaggaggcgtaacataagaaataagacctggaaatctaacacctctagtgtctactccaaattttgagtgataataatcacatagtaattctccagaaactttagtcacaccatatatagtattaggtctttgtaatgtatcttgaggagtcatattttttggagaattttcaccaaaagcagcaattgaactaggtgtaaaaaatttacaatccaattctttggctatttcaaggccatttattaatccattcatatttaagttccaagcttctaggggtttactttcagcaactgcagaaagtaaagatgctagatgaattatagtatctacatcatatttttttgcaatttcaaaaaaacgattcttatctgtaacatctaatatctcaaatataccagattcacatactggattaccttcttttactctccttgaactagcgattacattttgttctccatactcatttctaagctttattgttaattctgaacctatttgtcctaatgcacctgttataagtatttttttcaattttacaacctcctaagggtttaatttatgtagtactacttatttttattttagcaaatcttttgtttaaatacaaagaattaaagataataatatacgacttaattgaatgaagtgcagtaaattcctaaaaatttaaagttgagatataatggtctattgtataacaataaaagactagattaaattattatatagattgtgtgactaagtcacagaaagtatagttaatttaatatataataaaagcatatcaagtaaagctttaaattaaagtaactttatataaaaagtaatataaattgataaaattataaatttatttatagtgaatataggttggattttatagatacaaaaatagtatatatgatatgtagaccattagcatgtttaaagtagcaaaacatataaaataaaatttgaaaggaagtataaaaatgacaagaccatcaatatatcatagccaaggatacacttgtgcagaggcattaataaagtcttataatgaggaacacaacacagatataccaatctcaataggaagtggtatgggggttggaatgaatgttggaagtgtttgtggagctgtaaatgctgctgttgttataatagggtatttaaatgggcgaaatagtaatttagatgaaaatatagcaaggaagtattcaagagagctattgaataaagtaagaaataaatacagctcagaaatatgtgtatctcttaaaaaaaataaagtaacttgtgaagaaataataaatttcacatatgatgctctaaatgatatgctaaaaaatcaaaaataattctaagaaacaagtattttacattcgatagaatacttgtttttttatgatatttttaataggtattagtttattataatttttaaatcaattttattatattttaattgaaataatctactttgaaaattactaactgacaaaagaatatgattatagtatagaaaaaatgtaaattatttaatattaagtgagagtatatgcttacctatataaaatcgtataaattaatggctaaatttataaattataaagaaatatataagaaaacaaaagaattaattagtataatataaagttaaaaagtgaaaatttatataatttatttataaagtaaagaaaaaatagaaatttgtaatgaaataaaaagtttatgacataatatggtataattagtaaaaatatagagattggaggaattgctttgtttatagatgaagaattagaagggtatatattaacatgtaaaatatctgaagactttaaaaatatacctgaatatagtgatgaagagttttatgttacagtctataaagatgaaagttctgactctgggtactatgctttattagaaaataaagaagaaagagttgtatgggatggagaagttgttgccaataatatttttaataacctttggattgtagtaaataaggttaaaactggataatagtctaattatatagtatttgtaatattttaaatgaatttttacatatttgagatgagtaaataacaaagattattcgatactggaggagtaattcaatggaatatagttatagtaagatgaacttaaaaaaaggggatattgtagaggtaaatttagagaaacaagccaatgtaatattgttagaccatataaattatgtgaaatttaaaaatcaaagaaattatgattactatggtggatttgcaaagaaaaatccatgtagaatgagagttcctaatactggaacatggtatctagtagtaaatcaagatggaaatagtggaatagtaaacttttcaatcaatacaattcaaaattaattttagaatattggatattcttactttttgtactttttatatagttaaaataaaattaataagcaattattataaaataatgtgggtgcctcaaaatgaattttataattcacgagacactcttttttgtataaactcaaatatactttatcatttcaacaatgaaaaagaggcgtatctgtgttttgagatagcctcatttatcatatatcatatatagaattttaattattcttaactaaaattttttccataggttatctgtacaattaaaatatttattgttagcatacagctccacctgtaaggtgtaaaagagcctctagtatctcttcttttctttccaaaacttcatctgataaaagcatttctataaatttatcagcaccaattctatcgatagttattccaaaacgttcacctgtgttaccctgttctctaaataaaagaattgctttttcaattaaagtcataagttcctcttttgaaaataatctatcaatctgtgttccaggacgaactgattttccccatttccctcctatatagactttataaccagattctttttcttcaatactatcaaaattacaactttctatacacttaccacagttattacatagattactgtctatttcaagtttacctttatctgttaatttagctgctttaacaggacagacctctacaacagcacattttttacaaccaacacaaagctctgaatcatagtcaggtacacgttgaccaacaattccaagatcgtttaggtcaggtttaatacagttattagggcatccaccaacaccaattttgaacttatgaggtagttttacatcataccaatttttgtaaaattcttcgtgtatttcagtagcaagtgcctgtgtatcagctagaccatgaacacaaacagtacctttacaagccacaacaggacgaacccttgatccagttccacctgttattagattttcgctagcaataaattcacttagagcttcaatatcttcaaattttacaccaggtaattctactgttagtctagtagtaaatgctaactgaccgtttccgaatttttcagcagcttctgcaattttttttgcttgtgatgcatttattacaccatttacagttattatacgtgctgcaaaatgttctccatccctgcttggtagaaaacctctaccttttacttcctttttttgttctgctgtaacattactcatatttactcctccattaccttaagatttggataaaatagtattccaccttcaagaactttcgtatttgtatagccaaagcgtcttaagcgattttgcgccatatagctatttttacctttagcacatataagaagaattttttcatccttagcaagaccttcaatttctccattaatttcaccaacaggaatataacgtaaactaggaatagaaggagcttttgaaacatcaagtttagtccaactgtcaaaatcctcaatttcgtcaagtaaaacactatcaagttctccgttaagtttattttgtaaaacatttactgccactacaaaagggtgaatagctgttgaaaaaggtggtgcatatgcaaggtccatactttctaatgaataaaggtcagcgcctaaagttattgcagtagcagcgatatctactattttatcaaccgctccaggtcccataacttgaacacctaataattttctagtatttttttcagcaaccattcttataataaaattagatgcacctggataataatgagctttatcatcggtagctatggttacagagcaaacattataaccttctttttcagctatttctttacttagacctgtttttcctgcattgagctcaggtaattttactactgtcgttccaagaacaccattgtaagttttagattttccagatatattttgtgcgcaaattctaccctcatgatttgcagatgaccccataggtgaccatgtaggtttatttgttaaagaattttttacaaaagcacagtctccaactacgtatatatctttatcatttgtaagcatatattcatctgcaataattgtattattaggggcaaattctaaacctgtgtcttttagaaaacctgtgttaggacggattccaactgacataaccactaaatctgttttaatagctctatttttagtacgaagtttttcaactttattttcaccttcaatacctacaacctggtcacctgtaaaaatcattatgcctttatcagccatatgattttcaacgtattcagcaaaatcagtatcaaatccaggcataacatgttcagccatatcaacaacacttacacgtatacccattgcagaaagattttcagcaatttcaagaccaatgaaacctccaccaataacaacagctctcttaataccgttttcaatagaatctcttagttttatagcatcatttggagtacgcataaagaatactccaggtaaatctattccaggtattggtggttttattgggtctgcccctgtagcaattacaagtttgtcatagcttagattttctttttctcctgttgaaagcgttttcaaagttacttgttttgcatttctatcaatagacgtaacttcaactccacaacgaacttctgctcctgttagtttagaaaaactttcaggtgtatttacgattaaagatgatttatcttcaattatcttaccaacgtaatatggaagaccacaacctgcataagaaatatcatcacctttatttagtattgtaacagagcaattatcacccatttcacgttttatttttgcagcagtttttgttccagcagcaactccacctataattaatactttcacaatatatcacactccaatctactttataactctataataaaattatacttcttgacaatatatttgtaaaatactaaaatattaataaaatcataagcatttactaatgtttgctaaggttgtgataatatgacaattcgtagtcttgaaatctttgttaaggttgctgaatgtggtaaaatgagtgaagtagcaagaaatatgtatattacccagtcatcagttagccaagctatttcagaaatagaaaaagagtatggtgttaagttatttgatagaatttcaaaaaaattatatttaactgaggcagggaaaaaacttcttggatatgggaggcatcttttagctgtaaatgaagaaatgaatgattgtatgaagcattgtgcaaaaaatatccgtataagagttggggcaacagtaactgttggtacatgtgtaataagcccgataatgttagaattatacaaggtaaatcctcttatagaacctgaagtatttgtagaagatacaagactgattgcaaaaaaattacttaatagtgaattagatattgcgattgtagaaggaaaaattaagcacccagatattgttacaaaaagcattattaatgataatcttgtacttatatgttcacacaagcatgagttctacaaaagagactctataaaagtttcagaactttcaaatcaaccattaattatgcgtgaattaggaagtggtacaagagcacaattagaaaagcaattaaaagaattaaaaatcccaatgaatattagatggtcatgttataactctgaagctatattaagagcagttgtagataattttggcattgcagttatatccgaattacttattgaggattatttaaaaaagcatcttttgtgggcttgtgatattgaaggtattaacttacatagaacattcgatattgcatatcatagaagcaagttttttacagaaaatatttcagcattttttgatatttcagtagaatatgggaaaaaacaagcgagaaagaagagtagaagtgtaaacagtttataatatatctaaataaaaataagagtatatcaatatactcttatttttatttagatatattagcctatattaacgccaaaatttttacacaatcctgcaagtccatcctcaaatccagaacctaaagcattaaatttccactctccattatgtctatatagttctgccacgactattgctgtttctatgctaaaatcttcacccaattcatatttaataagttcctcgttagtttcttcattatatattcttatatatgaattttcaacttgtccgaaattttgtcttcttgtaattgcttcatttatagtaacactaaatgatattttagcaatattttgaggtattttagataagtctacatttatttgttcatcatcaccatcaccaacacctgttctattatcacccatatattcaacagctccagaagcgtgttttaaattattatagaatataaagtctccatcattcgttacttttccatcagttccagttaaaaatgcagaggcatctaaatcgaaatcaaatccaccatcatatttattaatatcccatcctagtcctactattactttttttagaccagggttactttttgttaaacttactttttgtccttttgctaaagttatacccatttaaaccaactcctcattataaattttttattgtaattattacttatatgtattaattaattcacgaagctcttcattttgaccaattcctaaagcattaaatttccattcttcatttctacgataaatttctcctgccaaaactgttactttaccagaaaagtcttcttgaagattatatttaaataattcttgcttggaatttgaatcaattaatcttataaaagagttgttcatttgaccaaaatcttggtctctttttttagctttgtatatagaaactccaaaaactattttatgtacatattcaggtatgtcttctaaattaacaattatttgttcatcatcaccttcaccttttccagttaagttatctccagtgtgtataatagctttagaagggtgtttaagatttccaaaataaaccaagtcacctctaacattcattttatcttggttagtcaatgctattgcaaatgcatctaggtcataattttttttacccaatttattcatatcccatcctaagcctactactagattttttacaggattattatcttttactaagctaactctttgtcctttttgtaaactaacactcattttaagttctcctttttatatttttagttttattgatggtatcaagtataagaaccatattagctatattatatacgtatttaggctaagttggctatatttataaattatttattatataactacatgaatattttataatttaaacatattgacattatatgatttaaattattttgtagttttataatatttaaatttgtatttgattgttataaagtaaagtaagtaataaagttagactcaataattctaaaatttctaagcacactatctaaatgagaacgtatttggaaatacttgtataaaacaataattgatacatttaatttttatcttaaaaataacaattataatatataaatagaaagtataatatataaatagcaagtataatataacatataaaaagttgaatttgtatatgttaattatacttgctatttattgttagttattctatttttttaaatccattacctaaagcttcatgtatatctgtaattataataaaagcattagggtcgacattttttactaatttttttaattcgacaacttctttcttttcaactactactaaaagtacatttttattttctccagtatatgcaccttctccttttagaatagttgcacctctatctaaatcttccattatttttttacttatatcttttgaaaggtcagatataatagtgaatgatttggaataattaaatccttcaataagcaagtcactaacttttactaaaatgtataaagccacagttgaataaagtgcaatttcaacctgtctatttactatacctgataaaacaactacaacgcagtctacaatacccattaaaacaggtatactaaatgtaggaaaatatttatttagtaggagtgccattaaatcagttccacctgtagagccatttattctaaaaataagtccttgaccaactcccattaaaatagaaccagatataattgcaagatacatatcatttgttatatctaatgtagccatatttgcagtaagcttaagtgctatggtaagaaaaattattcctaaaaccgttttaaaacaatctttttttgaaagtattttgtaagcaaatatgaataatggaacatttaaaagtaaattgacaatccaaagttctacaccgaataatgaatttaaaacaactccaagtcctgttataccaccagcagcgattgcatgtggattaaaaaataaattaagagaaatggccattaatatacagcctacaattaatattaaaatttctgaaaaagttattctatcttttttcaataacatcactccttatatatagattataatatatattatatagtttttccaatttttaataaaagaaataaaaatatattataaaaacaatttgattggaattttcagaaaattaatgctataattaaaagtaaatttaaagggaggttataaaatggctaaattaactctagaacatataaaaggaaatacatattatattccactccctacaatagtaggtgtatacgtagatggtaaagatgcaattttaattgacagtggaaataataaggatacagctagacaagttttaagattattagaagaacataatttaagtcctaaattaataataaacactcattcaaatgcagaccatataggaggaaatgcatatttgaagaatcaaacaaaatgcaagattgctacgactaaaattgaaggatattttacagaaaatccaatattagaatcagcatttttatatggtggctatccaagtaaagcactgaagaataaatttttattagcaaaggaaagtgaagttgattatattataccttcaaatggcaaaattgtagatacagaacttgaagcgatttctcttccaggtcattattttgaaatgattggtgttagaactccagataatgttttgtttgttgcagatagtcttacaccagagaatataattactaaatatcattttttcttcctactggatatagattcacagtttaagacactagaaaaattgagaatgttagaggctgatttctttgttccaagtcactctgtcaaaactacagatataaaaagtttgattaatattaataagaagaagatggaagaaataatagataatattaaaaaggtttgttatgagccagttatgattgatgaagttattgaaaaaatgtgtgatttgtacaatgtcaagcttgatgctaatcaatatgtgttggttggaagtacaatacgttcttatataacttatttatatgagaataatatggttgaatatatatttgatggtggtaagatgatgataaaagctgtgtaaatagtaataattttcaaattatatgatgaaattgttttagtatgactgttatttgaaaagtaacataaaaaaatttatataaataagctaagatgattgatataaagttactgataattttaaggtaatatatacgttactataatattatgttattatttgtaaataaggggataatttataagcaaattaaagaccttaatttacaggaggaatagtgtatattatgaataaaaaattcaaaaaattcagtaaaaaactaagtatattaattttagttttgactatgtttctttttaataatttaactgcaaatgcacagattaaagaagattcaataataggaattgatagatatgaaacagcaggacttatagcagatagacaaacttatgatactgtaatattagttaatggagataaaaatttatctgatgggctttcatcaagtggattagctggagctattaacgcaccaatacttttgactaaaaaaagtgaaataccaaaagctactttaaatagactagataataagagtttaaatgttgtaaaaaaagtatatataattggtggttataatactattgaaaattcagtagaaaaagatataaaaagaaaaggtattcaagtggaaagaataaatggtaacaatagaattgaaactagttataatgtagctaaaaaaataaatgaagtaagtagtgtaaaagaggtaatgcttacaaatggatttgtaggagaggctgatgctatgagtatagcacctgtagttgcaaaaaataaaggagctataatacttacagatgggaaatcagttccatttaagactgaaggtttaaatgtttacgctataggtggcaaatctgcgataaatgaggatttagtaaatgaaactaaagcaactagaatcggaggaaatgatagatttgagaccaataaaaaggtaatggaaaagttttataatggagcgacagatttttatataacaaatggatatcaattagtagatgcactaacattatctcctttagccaaagaaaaaccaatcgttttagttgctgatggaagtaataaaggtattttaaaaggagctaaaagtataacaaaagttggaggtattgatgccaatatatataaacagtgtttagatatgattaaatataataatatggatgtgactccaaatattttaaaacacttaacttcagttgaaggaaatgaagtttctgaaatacttatagaatcagataatttaggtgtggttgttgaaaagacgaataccaataaatttgagtttgattacgtaagtgtaactaatgaaaaaaattgtactttttctgtatataaagaaaattcttctaataatgtaaaaaatggaaagctagttgtaagtgctaagaaaaaaatagataagaaagatagtgatttgcaagatatgaatggcgacaatatgataaatgcaaataaagataggatggtaaatgtgataaaaattggagttcccgataaaatgtattctaattttaaagtagatgttgaaagtggttcagtagaactttataatattaaaggaggagctactgttgatgtcaatgacggaattgctaacattgttgataacaatgtgacaaatcctttcaatataaatactaatagtgggatttcaggtgtaacagctgaaactatatcatctgagataaaatttagagcaaacaatggaattgtaagtgtaacagctacaaatataaatggcaatataagtttatttggaagcgataataaaggtacctttgatggaatatttaaattaaatctgaaaaaagaaccatcaaatttacacttgaagttagttggaaatgggataaataaattgccagaaggttggtctaaagattatattttaggaaatggacaaccaattattgaagttaaaaataatggcataaataatatatcaattggagaataaaaacatatgaaaataaagtttatatagttttaaaaattatagaattttaaaatatttatatatattctttaaataaaaaattattttttaagtgataattaagtatttatcgataaggctatggttgtaaaaatcatagccttatttttatattataaataaattagagtatttatcaattcatagtagataaaattgaaattaaatataacaacaaaaaatgaaaattacaattaatttaatgttaaagactcaattatttggatgtggaatggatagtacaagtagtatataaaaagtattgactggacaaataactatattttattttaaatatataatataatgtaataaaatatatcaaatgtagaaggtgataacctatgaaaaaaataacaataaatgatattgctaacttggcaggagtatctaaaagtactgtatcaagatatctaaataataaagatatcagtgattctactaaagagaaaataaagacaataatagatgaatatggatatgagccgaatgcatttgctcaaagtttgagagctaaaaaaacatactttattggtattataacaccgtgtttagattcttttgtaaaatctaaaattatgatggcaatagatgaagaactcaaagaattaaaatatacatcactaattattaatactaatagaaaaataaggtcagaaatagatagtatatcaaagttagctagtctaaaagttgatggaataatactaattggtaccgaaataactaaagaacataagaatgaaattgaaaagttagatataccaatggttgtagttggacaaaaagttgatggtatcaatagcatagtgaatgatgattatggagcaggatataaaatgggtcaatatattgctaataaaggttacaaaaacattgtatatttaggtgttgatgaaagtgatatatcagttggtttaaatagaaaaaatggagtacttaatgggttaaaagataaagggtatgatgcaaaagtattttatactgactttgaccaagaaacgtctatacaaagaagtggagaaatgctagaaagtgaaaatccagatataataatatgtgcaactgataatatagcaatagcaacaatgaaagaaatcaataagagaggtaaaaatataccacaagatatatctgtagctggatttgggggatatgatgtattgtctattataagccctaaacttacaacaataaagtttgaaaataaaaatgcaggtaaagtagcagcaaatacgatagtgaacttaatacaagaaagaaaagaaccactattaaaggagattaaatttgaattaatagaaggtgaaagtacaataaataaaaattaagatacacattacatatattagtaatgtgtatttttttactaaaaaaactataattctaaaaattaggaaaacttttttgaaagaaatattgcatctgaaataaatttatgctaatctttaattaaaccggtttcgaaaccggtttaattaaaccgaaagaatagcacaatgagtgcaaaaataactgattgtaacaaagtatcaaagtaattattagagtacataggaaataaacaaaatataaaaggtgtagcacattgtgtaacaagattaagaattgttttagatagtaataataaagcaaatataaaattacaaaagaaaaggaataaaaatatgtacaaagagcctaaatatagaaccatattagaatcgataaaagaagaattaaataaattaagaaatatatctttaaatgataaatataaaccactatttcatatacatccacaacatggactacttaatgatccaaatggattagcatattataatggtaagtaccatgtattttatcaatggtatccatatgatgcaactcatggaatgaagcattgggcttatgtaagttctgatgattttgtaaactggaatagagaagatgtagcattaataccaatcgaaagttatgaatctcatggagcatattcaggtaatgcgatagaggtagatggaaaattgcatatgtattatacagggaatataaaatatagtgcagaagatagatatgcatatcaaaacttagctataatgaacaaggatggtaaaataactaaatatgaaaataatccaatagtaagtgaaataccaaaaggatatacaggacatgtaagagacccaaaagtatttaaaagaaaggataaatactttatgttacttggagcacaaacaagtgataaaaaaggagttataatagtatatgaatctaaaaactctatagattggaattttaaaggagaattaaatgtaaaaaatatagatgaagattttggttacatgtgggaatgtccagattatattaatatagatgaaaaagatatattaatattttcgccacaaggagtagaacctaaaggatttgattatcaaaatatatataatgtagtatatgctattggtaatatggatttagataatttaacatttgaaatagatacaatgaaagaactggaaaaaggatttgatttctatgctccacaaacatttataaaggactcacaaataatactatttgcatgggctggaatgggagaagttttataccctacagataaaaacaaatgggcacattgtctaactgttccaagaaaattaaatataaaaaataacaagctattgcaaatgcctgtagatgaattaattaaattaagatatgatgaaacaagtgggcaaaatactataaagaataatatcaatattatagaaaatgatgaaaatgtatatgagcttaatattaatataaaaaatattgacagcaataaatttgggctggaattattttcatcacaagatgaaggtgtaaaattagaatttaacaaattaggaaacattgtaactttagacagaagcaactttaaaaaagttttcggtgttgaatatggaacaaatagaaaagaatatataaatattgatgaaaatactaatatcaaagtactagcggatagaagtgttttagaaatttttataaatgatggagaagtagtatttactagtagaatatttgctaaagaaaattctaatcaaataagggtttatagtgataaaatagtagagtatgagtatactaaatttaaattaaagcaaggtattgaattataaaaacacattataaggggtagaaaagatgaaaaaagtaattagtataggagaagctttaatagactttatacctaatcaaaatggttgtaaattaaaaaatgtatcagaatttagaagagtagcaggaggagctccagcaaatgttagtgttgttgtagcaaagcttggaggaaaatcaagttttatatctaagttaggaaaagatgcatttggtgattatataatagatgtattaaatgaagtaaatgtaaatactgattatgtattgagaacaagtaaagcaaatacaggacttgcttttgtatcattaaaagaagatggtaatcgtgatttctcattttatagaaatccaagtgcagatatgcttttagaagctgatgaggttaaaaaagagtggtttaataattgtcatatcttacatttttgttcagtagatttaatagatagtccaatgaaattagcacataaaaaagcaatagaatacgcacttgaaagtaatagtataataagttttgaccctaatataagattacctttatgggatagtgagcaatcttgtaaaaaggcaatatcagaatttttaccttttgctcatattgttaagatatctgatgaagaattagaatttatgacaggagaaaatgatatagaaaaatcattacataaactctttgtggggaatgttgaactagtattatatacaaaaggaaaagatggagtagatgcatacactaaaaaagtaaaaggtatgtgtaaaggggttaaagtaaatgcaatagatacaaccggagcaggagattcttatataggttcatttttatacaccttattgtataaacaaataacattgaatgatataaaagaaatgaaacaagaaacgttaaatgagtatttagaattttctaattattatgcagctcgtagtacaactattaaaggtgcgataagttcatatgcaacaaaggaagagataactgaatttataaaaaatttatagtaggaatgagtaataggttttgaaggaagtaacatgtaaagagtttttaaggatgtttactatgaaaataattaacatataaaaagcaataaagaggctgtctcaaaatagatataagcctctttatcattgttgaaatgataaaaaatattttaattattgttactttttagaagaatatatatcttattttaaataagcaaattatgtaagatttatttatattatcaatactttacttggagtattatgtctttagcagttatctacttcaattgaattatctaaaatataataaatttgttttgcaaattgacgagaatgtttttctttttctttattcataaaattaggtttacctaaatcacgttcaacaagcattcctatatattttaactgtgaatgcttacagtagcgcttcataccattttcccaaatatcagcacccttttcaggtctatatccacatgttgtaataagtgctactggttttcctgcccatagagcggggcctttctcattaccatagtacttattcattccatacaccaatctgtcaagtagtgctttcattggagaagtgcagtaccaagaataaattggagtagcaaaaacaattaaatcacacataagaattttcttgaaaattttctgaacatcatctttacaataacatccaaaatcaaataagttatcctgacattttttacaagcaatacatggctctattttacaatcatataaccatattacttcaatatttgaattataattttctaattcctcaataaaaggttttaaaatagcagcagtattaccttttttcttaggacttcccataagaatgcatatttccatattgatacctccacagtattttaaaatagtttttagtgcttaatatagttttaggatactatgagaatacgttaacaacaatacactttgtatatttttaataaaattgaaacaaattgttttatcaataaaagttggaatgtatctataattaaaaatattttaggtatgtttttacatatatgtgtgtagttaactatggtaatttattgtaaaattatcttataggattataattgcttaatttatgattatatttaaaatcttggaggtaaaaaatatgtactcaaatgaagactataaatttatagaagaaaatgcaccatgttatatatatgatgagactaatataattgaaaaatgtaaggaattgaaaaataatattttaggttttgattttttatattctataaaaacaaatccatataacaaaattgtaaaaagcattgcagagcaaggttttggagcagatgcttcttcaactaatgaagttatgatttcatcagaatgtggagtttctaaatatgatatttattattcatcaccaggcaaaacagagattgatatagaaactgttttagataaatgcataattattgcagatagtattacagaaatagaacttataaataagatatctaaaaagcataatcagaaagttaaaataggaataagaataaatcctgattttactatggatgatgatagtgctaaatcaagcaaatttggtatagatatagaagatatgagcagtgtttttaagatgttaagtatgtgtgattatgtatctgtagttgggattcatatacatattaaatctcaggtattggattttgaaaagttaggacattattatgaaaaatgtttttttatagctttaaatttaaataaaagtaagtatattaatattgaatttataaattttggtagtggacttggagtagcttatgataatcttagagaaaatccacttaatcttaaagagctttcaaaattaactcaaaagattgtttttactaattcaaacacactgaaatcaagacttcttattgaatcaggacgtttcatagtttgtaaatcaggtaattattatgttaaaattgtagatattaaagtatcaagagggaaaaaatatcttattgtaaaaaatggacttaatggatttatgagacctattatttctaatttaattgaaaatattacttgtggagtagaattagaaggtcaagagccattatatacatcaaatcatgccttttctctttcagtattaaataatttaaaagaagaagagtatgtaaatgttgttgggaatctctgtacatcattagatgtaattgcaaataatgttaaattgaaaaaagcaaatataggagatttgatttcaattagtaatgctggaagttactcctattctttatcaccactattattttcgagttatgaatttcctaaacaatattataaaagaaaagatggatatattgagtaaacaataggataaattaataaacttagtattattgaaaaaatttaaaatgcagggggtgtaattctatatggaattgtggaaaagaaatttatttgtatgttggataggtatgttttttagttctatagggatgagccaaatagcacctatacttccattatatattaaacagttgggggtaactgatgttagtttaatacaacagtattcaggtataatttttggatgtacctttgtagtagcagcattcttttcgccaatttgagggaaagctgctgataaatatggaagaaaatcaatgcttttacgtgcaagtattgggatgggaatagttatatttaccatggcgtttgttcaaaatgtttatcagttattaggattaagaatacttcaaggagtttttacgggttatgctactgcatgtactactcttattgcaacacagacagataaaaatcattcaggatgggctttgggtactcttgcaactgcatcaactactggctcattaattggtccaacagtaggaggatatatagaatcaatcttgggtcttaaaagtacatttattataacaggaggattgttgtttgtatcatttatcatctctattttatttgtagtagataattttaaacctaaagaaataaaagaatcaatttctatacctaaagaacaattaaatatattgccaaataaatttttaattgcatctatttttgtaaccacattcattactcaactagctttatactctatagaaccaattgtaaccatatatatatcacaacttacaaattttgcatcaaatgtagctttaatagctggattgacattttctgcatcaggattagcaaatttattagcagctcaaaaacttggaaaaatgtcagataaaataggtcctcaaaaagtattgttaatttcacttttatgggctgggattatatttataccacaagcttttgtaaaaactgcatggcaactgatgttgttgagatttttattagggttgtcagttgcagggcttaatccttctgttaacagcttgcttaaaaaaattgcaccagaagaatatgtgggaaaaatatttggatataatgcatctgcccagtatataggttgttcatcaggagcatttttagggggacaaatatcagcacatttaggtattagaacagtatttttttcaacaagtttattgttgtttatgaatgcactttggatgtataaatttactggattgtttattaaagataagactaaataatcatactatttacatttctaattttatgatgtaaaataaatattttttatgtaatttatcatagaattatataaaaaataactctatggtaaaaattggaaaatattattatcgacaaaatctttgacttaaaaactatattgcgatagtattaatttaataaaagtttgagaggggcgtaaggttatgacaatttcaaaaataccacaagcagaattaaaagttatgaagtttatttgggaaaaaaatgatacagtaacatcaaaagaaactattgaagctatggaacgaaaatatggttggaaacaaacaactacattgacacttttatcaagacttgttaaaaaacattttttaagtgcagaaaaaatagatagatacactcattatacaatagttgttggacataaggagtatttaagtgttgagacaaaagattttttaagcaatatacacgacaattctttacagagtttaatttcagcactacatgatgatgaagttgttgataaagatatgttggatttatttgaaagtcattttaaaaatttagaagaagagtaattatatcaggataaaactctaagaatttaattaatctatggctgaaaaccataaatggtattatttaatcagctactcactattcataaagtaatattaaataggttctctaattagtaaaatacctaaaataattggaatagggagtatcaagttaaatgataccacttatttaaataagaaatgatttttaaaatttaaaataattttataacttgtcaatattcattaatctaaagtattatttctatttaaccatatcaaaatatattttactatttttaattattacaatataaacctgtcttttgttattataggtaaactaaaagtaagaaatgatttttatatttttaaactttattattggtaacttatctgtaaatattttaaaatgtactatagaaagttgttaaaaatattaaataattatattaaatttaagtgtgttttttatgctataattagtatgtattttttatgatatattttataaaaaatataatttaatcatttttgaggatattattatgttagatgcatttataacaattgtttcttctattatagaaatatggtcatgtaaaaaagtttttgattatactagtcagtcaaagaccgacttaaaaaaactaaatatgtattttctcttttctgtttttcttattatttcttctttatatataaatataggagctaatagtagaatcttgatatgtatatttgtaatgttcgttttctataagtctaactataaggttaatatatataaatgtctggtaatctcatttttttattggttaatattaataggtataaatggattaagtatgttattagtagcaacagtaagcaatttggataatatgaatgttttacttagtggcagtttatatagatatgaagcaatattcttgggaaagataatgttaggtatattactttatgtttataaggcttcttttaaaaattttaaaataagtaaaaaagagatatacatatgtattcctatgatagcaaatttattgtcattttttgtactttatgattatattattaatcttgtaaaaatctctcctgaaagaagaactgcttttttagtaatagttttactattaatattatctaacatttcaatctttgtattaatacatataatacttaagattaaaattaggaaaataagataaattttaatacgattcatttaaattaaaagttaataattacttttttatgtataattttacatgaatttctataaaagttattttattaaagatagatatacttatatatacggatatgattaaaaaaagtctttttaactttaaaaattaatgttaaaaaataaacttatacattaatattaataataattatttaaatatcttaagtaaatcagtcttacatatatttccgatagattatattgataaaaaacactaaaattaaattaataaaagtacttggagggatggaaatgaaagaggaaaattttattaatgttgaatacgaggataaacgtttttcaattaatagtaaagaagttttgtacatagaaaagcaagagtatgaagtaaagatttatactgaaagtggtaattatgaagttggagaaaatgctccttgtataagaaaactattgaaagaagaaaattttttcaaatgcagtaatagttatattgtaaatctagacaagtgtgaattttatctcagcaataattgtatttttgtgaataataattttataagaattttaggttcagaaagaaaaaagaaattaaaaaagaaattagaaaaattatatgattatgaagattaatattgggaggctgtattttatacagcctctttatttattgattgtattattaataaattttaaattatgataaaatataaaacaagtaacttatttcagaataaaatactttttaaaagaaagggacgagatatgggagattataataaaatgattgaattaaagaataacttaggtatcagtgaaagaaagttaaaatatccttgtatctataaacattttaaagggaaatattatgctacaatgggtcttagcaaggctattgatgatatagaaaacatatgtgaaatatatggtaaagaaaatttaatccaaaacagaaataaatataaattagttattagacatactgaaagagaagaagatatctatgtttatagggatttagatggaaacctttatcataaaaaagaagaagatactaatgatttagttttatacaagaccttatatgatgatacaggaatatttgcaagacctttggatatgtttttagaaaaagtagatacagataagtatgtcaattcaattcaagaatacagatttgaagaagtatataaataatataagagaaatatgtttataaatttagaaaaattctttaacagtacaataatttgcagaaatacaaatgagatttattgtaaataatatgttagattagattataaaatagaaacaaagtaaagtattatatgatataattaagttttgagaagtgataatttatatttaataaaaaataggcatatattaggaggacatatgggaaatactttttatatagtaagacatggacaaacggattggaatatattgggaaaaacacaaggtcatggtaattctgaccttacgcctcaaggtatagaacaggcaaaagaactttctgaagatattggcaagtattcaattgattatatttttagtagcgaccttgggagagcaatgcaaacagctcaaattttaggagataagctcaatattgaagttcaaaaaactgaggcacttagagaaatgggattcggagtttgggaaggccttttaataaaagaaattcaaaaagattattcagatatatatgcaacatggagaaatgaaccacacttagtaaatataccagaaggcgaaactcttaagattataaaggaaagagtagatgcttttataaaggaactaaatgaaaaatatgataataaaaatataattcttgttacacattcaattacattgagggttatgttgttgtcatttttagaatcaggtatggaaaatatatatagaattaagcaagataatactgctttaaatatagtagaatttaaagattatggacctgttatagtaaaaatgaatgatacaagtcatataaaaaatcatgtaaagataaataattctgcactggagtaggaatcaattataaggagaaatttatgagtaaagttatagtagttggtggaggagcttctggaatgatggcagctttgtcagcttcaaaaaacaataatgaagtaatattagttgagagaaatggagaattaggaagaaaacttagggcaactggtggcggtagatgcaattttaccaataatagagagatagaagatttttttgataaagttgtcagtaataaaaaatttctctatagtagtttctatacatttacaaataaagaccttatttcgtattttgaaagtagaaatttggaatataagattgaaaaagaaaatgaccacaaagtatacactaaaaatgataaatctatagaagtaatagaagtattaaataaagatttactcaatcacaatgtaaagataatgtataataagaaagttatagatattataactgaagaaattgctctaaaagatgattctaataaggacaagtcaaagtatctaataaaagggattattttagataatggagataagatactaggagacaaggttattatatcaactggaggagtgagttattcaaagacgggttcagatggttcaatgtataagattcttaaaaagcatggacatacattaaacaaactatatcctgctttagttccacttacaatagaggaaaaatggattaaagatttacaaggaatatccatgaagaatgtggaaatatcttgtaagattaagaaaaggaaaatatcaaaatctggagacatgctatttgcccattttgggataacaggaccttgtgttcttataatgtcttcttatattaacaagattattgaaaaggaaaaggtagaattaaatatagatttcttaccaaatttaagtactgatgaaatctctagtataatcagagcatttccaaataaaaatgttctaaataatcttaagcaaatactacctcaaaatttcttaagagagattttttctctattatctttagttgataaaaaggcaagtgatttgtctaaggcagatgaaattagaattattgagtatataaaaaatatgaagctaacttgtaatgggactacaggtataaacactggtatggttacttctggtggtatttcagttaaagaaattaattcttctactatggaatctaaattagttaagaacttattttttacaggtgaagtaattgatatagatgcagaaactggtggatataatttacaaatagcattttcaactggatatcttgcgggtataagtgtataaatataattttttaataattaaatatgaataaatagaggtgtatatatgggtaatttagttatagctgtagatggtccagcaggagctggaaaaagtacaatagccaagatagtagcaaaaaagctaaatataaattatatagatacaggtgctatgtacagagcagttacttataagtgtttaaaaagtggtgttgatgtcaataatgaaaaagaagttattcaaatagctgaaaattcggatatagattttaaagataacaatatatatttggacaaagaagttataaatgaagaaataagaacaatagaagtaagcaataatgtttctaatgtagcaaaaataaaagaagtaagacagttgatggttgaagttcaacgaaaaataggaatgaaaagttcagtaatactagatggtagagatataggttcatatgttttcccagatgcagattacaaattctttttagtagctactccagaagaaagaggaaatagacgctataaagaactttgtaataaaggatataatactactttagaagaagtaattgaggatataataagacgagatgaaattgattcaaatagagaatttgcaccattggtaaaagctaatgatgcactagaaatagatactacaggaaaaactatagaagaagttgtagaagaagttgtatctaaaataaatctttagttttttatgcatcataatgaaaataaatgtagtgttgaagggagataaacgtgaatttttatagatttgtaataaatatttttaagggtttttctaaaatattttttaaatatgaagttataggtgcagagaatattccagatagaggaaatatagtaatagcatcaaatcataaatcgaatcttgaccctatattcttggctgctgccatagaaaatagggaaatagctgcaattgcaaagaaagaattgtttaaagtaaagccattgggatttatattaaaaaaattgcatgttatgcctataaatagagaaaaaccagatgtatctacaataaaaactattttaaggtcagttagagatggttatgtattaggaatatttccagagggtactagaataaaaggagattcttttggtaaggctaaggcaggtctttctgtatttacaataaaaagtaaatctaaagttgttccagtatcaataatatctaaatataaactttttagtaaagtaattgtatatattggagaaccaatatcatttgaagaacattttaaggaaaaattgagtaatgatgaccatgaaaggatatcacaagagattttagaagtgataaaacaaaattactttaaatattcaaaataagggggtaaagttatgaacataaaaatagcaaaaaatgctggcttttgttttggagtaaaaagagcaatgaaaatggcatgggatgaagttgaaaaaaatgattctggcatatatgctttaggtcctcttattcataacaagcaagcagtagcaaaatatgaagaaaaaggtcttaagactgtgaatgaaattgatacaataccaaatcatgaaaatatgataataaggtctcatggagttcctgaaaatatatataaggaagccaaagataaaaaattaaaaattgtggatactacatgtccatttgtaaagaaaatacatacagtagtaagtgaatatcataataaaggctatgaaataatagttattggagatatgaagcatccagaagttataggtataaatggatggtgtgaaaattcagctataataataaagaccttagaacaaatggaaaatatggaatttaataactccaaaaaatattgtcttgttgcacagactacaataaatccagagttgtatataagtatagttaataaactatcagataaattagaagaaatagtatttaatgatacaatttgttcagctacaaaaacaagacaagaatcagctaaagagttagctaaagaagttgattgtatgatagttataggaggtaaacacagttcaaatactcaaaagttagtaaaggtttgtgaagacttagtaccaacttttgcaatagagactaaagatgaattggatgtaaatacgcttaaaaaatataaaaatttgggtattacagcaggggcatctacacctaattggataatagaagaagttgtaacattccttgaaaatttataatttgataggtaataaaaataggtggacattgttataatttatcataatatccacctttgatttcatattacatgtggtaaatagataacctaatatcaaaaagtgtgtatcttaagatgaaaaactaagagtataagatgcgcactttttaatattaaaaattcaaaagaaatattgatattgattatcaatagaaaatagaatataatataattgttgcaaaattagtctaggaggtaaattaatggaaatgttgatatccgcttctgaagaggcgtttttacatgtaggttctatgattggattttttattttgttatttggatatattaattataaaactagtggaaattttactaatatcatatcaaaaaacagaaaatttcaacccttaataggtgctttaattggagctataccaggttgtggcggaagtctggcaataatgccattgtatataaatggaaaattaagctttggagcaataattgcaagtttaatagctagtatgggagatgcagcatttgtacttatttcatcaaatattaaaatgtatttttttgtcactatagttagtacaattacaggaataataacgggacaattagtggattactttaaactagaagaaaaattagggttaaaaaaccgtagaaaatcagataaatatgatataagtaaaaataaccctaaagaaaataaagaacaacataatcatgatgaaataattttagacactctagctaaatctcatggaaatacaaatagacttgcatttataataacacatggaaagggatataaattttatataggaattatagtaatcggttttatatttatgtcacttgctcactctggacttaatcttcctataattgagaagttacattcattggaagaagtaatagcagtgattggaatattattttcaataatttatatgtggtgttttaaaaaggtatttaaaaattctaatcaaaaagaggaagaaaataaaaagatttctttgcgagaaatgcttatccattctgttggagaaatatcatttgtaattacatggatttttattgcatatcttatttacgatttgataatattaattttaggtggagatgaatacttagttaaactagtattatcaacaggtgtaataagtgtatttataggtgcaggtcttggacttattccaggttgtgggatacaaattgtgcttatgtcattttatttgaagggaactataccacttggtgcagtgatagccaactctatttctcaagatggagatgcacttttcccacttttagcaatggataaaaaatcttctttatgggctatgattattactactataccagcaatacttgtaggtatgatagtttatgcatttttaggttaaatataattacgaataaagaagtattaaaaaaataataaagcacataaatttatttataagaatagtgaagattaaatataaaaataaaaaattcaatatgaattaaattattgcttaaatattaatgagaacatgggagataatattattcctcatgttctctctatttaattaaaggaattatggaacaaatttcaagtgatactttctatcaaaactcatatataatatatattaataaattaaactataatacgtaatacagccagtatattgatataaaaaacttaggaggagttgtaaaaatgggtaatttaaaaagacagtgtgatgtttcaagtggaagagaaaaagctgacattgtactaaaaaatgggacaatcataaatgtatttacagaagagttaataacaggagatgtagcaatagtaggagacactatcgttggcattggcgattacaagggcaatgtagaaattgattgtagcaataaatatatatcacctggctttattgatgcacatatgcatattgaatctacaatggtaatgccaattgaattatcgaaaaaattattaaaatcaggtacgacaactatcatagccgacccacatgagttggtcaatgtaaaaggagctagtgcaatagattttttattagaatcgacaaaagatataccacttaatgtatatattatggtgccttcatccgtacctgcaacaagttttgaaactaatggagttggtaaatttagtgcaaaagacatggagagttatgtaaataatcctagaattttaggtttaggagaggtaatgtgttttaatgatgttataaattctgaaaatgaaatcttggataaactagagctttttaaaaataaagttgtagatggacatgcacctaatataaatggtaaatcacttcagacatatgtatgtgcaggaatagaaaatgaccatgaatgtataacttttgatgaagtatatgaaaaattgagagcaggattaaaaattttaataagagaaggaagcgcagcaaaaaatttaaagtctatagtaagtggtatgctaaagcataacttgccaattgaagaatttatgttttgcacagatgataagcacttagatgatatagaaaaacaaggtcacataagatggaatataaaatgtgcgattgatttaggtatggaacctgttagggctataaaagttgcaacttataattctgcaaaagcatatgggttaaggaaaattggagcaataggtgcgggttataaggcagatattgttgtattgaatgatttagacaaaatggaagtggatagtgtatataaagatggtaatttggtaaacgaagagatgttttctaattacaattatgagattaaagataaagaattgcttaatacagtcaagtttaagtatattaataaagaaaaaatacagttaaaagtaagtgaaaaaaattatgtaatggagattgtaccttatcaaattttgacaaataaggtatatgaatctttaccatgtgcagatggatattttgttccaaataaagagtattcaaaactttgtgttgttgagagacatagaatgactggaaatgtagcaattgcttcactaaaaggatttggcataaaaaatggagcaattgctactactgtggcccatgattctcataatattatagttgcaggggataatgatgatgatattctagtagctataaattacttaaaggaaatacaaggtggttatgtaattgtatcaaatggaaaagttcttgcacacctaagtcttcaagtagctggattaattagtacttttacagctgaagaagtacaagaaattactgataatatgttggagatagcaagaaaaatgggagttccagagtatgtagacccttttattacactttcttttatggcacttccagttgttccacaaataagacttacagatttaggtctatttgatgttgaggaatttaaatttatatagataatataaaagtaataataaatgaggctttctcaaaatagggataagtctctttttattgttgaaatgatgaaaatatatttgatttcatacaaaaaagagcatctaatgaactaaaaattttatttttagatatccttattttaattaatctatcatttaaccttgttttaagcatagatatcttaataaaactattttcagtctattttagaatataaatacatgaaaattatatatttatgaaactttatacataaaaaataaaatattttatttatatatagatttatagggtaataatataagcatagtataaaattattaataaaaacaaaaggagagatatttatgttgagtataggaacaaaagcaccagaatttacactagaagataaagatggaaataaggtaagtatgtcagattttaaaggcaaaaaagtagtagtatatttttatcctaaagataatacaccaggatgtacacgtcaagcttgtgcttttagaaatgcatatgatggatttaaaaaggaagatatacaagttattgggataagtaaagatagtataaaatcacatcaaaaatttgcagaaaagcatgaacttccttttattttactttctgaccctgacttagttgctataaaagcttttgatgtatggaaagagaaaaaaatgtatggaaaaactgcattgggagttgtacgtgcgacatatattatagatgaaaatggaattattgaaaaagtctttgaaaaagcaaaaccagacacaaatgcacaagagattcttgaatatttggaaaaacaggagtaataagaatttatgattataatgttatcaccagctaaaaatatgaagaatatagaagtatttgatagagatttgagtttgccttgttttatagataacacaaaagaaatagtggaaaatataaagacatttggtatagaagattttaaaaataaaatgaaaattaatgaaaaattagctgtattaaataaaaatagatttgaaagcattaaatttgatagattaggaaaccctgcaatcttaacttatgatggaatacaatataaaaatatagaagcagaaaattttacaaggaaagatgaagagtttgcaaatagctgtattcgaatcataagtggattgtatggtgttgtaaaaccatatgatagtatatatgaatatagattagaaatgcagacaaaattacgagtaggtgagtttaagaatttatacgaatattggggaaatcgtatatataaagaactaatcaaagaaaaaacagctatcattaatctttcatcaaatgaatacagcaagtccatagaaaaatttattaaagatagtgatacatatattacatgtacttttaaagtaaataaaaatggcatattgaaagtggaatctacacaagcaaagaaagctagaggtatgatgacaaaatacattgtaaaaaataggataagagatattgaagaactgaaaaagtttaatttagaaggttataagtataaagaaaacttatctaacaatagtgaatacatatttgtaaaagagtagaagttttgttaaatattaaatggcattgttaaatttaggtaaaatatacttagtgtgtattgaattgaacttgattttaaaatataattattcttaaattaaaaaaagaaaggagtggtcttccaaaatggaaaatcacaaacagatgccttggcattcaagagcaacgcatgaaattttagaaagtctagattcatcagaggaggggctcaccgataccgaggcggaaaaacggcttaaagagaatggcttaaatgaacttagaaaaaaaccacctagaacaactttacaaatgctttggagtcaaattacagatgctatggttatgatactaataggagcagcaatattatctttgatatttggcgaatttacagaagcttttgtaatactaataattgtaacagtaaatgcagttattggaattgttcaagagaaaaaagcagaatcatcattagaagcattaaaaaatatgaactcacctacagctcgtgttatgcgtgatggtgaagaaaatgttattccagcaagtaatcttgtagtaggagatattgtttttttagaagatggagctatggttccagcagaccttcgtttaatagaaacatcaagtttaaaaattcaagaggcttctttaacaggagaatctgttccatcagaaaaagatgcagatacaatcttacctaaagaatgtgtattaggagaccgtagcaatatggcgtatacatcttcaatagtcacatatggtagaggtgtaggtgttgtagtagcaactggtatggatacagaagtgggtaacatagcacatcttttagattcacaagatgattttgatactcctataaaacgtaaacttaatactgttggaaagacattaagtgtcataggtattattgtatgcgttgttatatttgcaataggtgcattttatcagagacctctcttgccaatgtttatgattgcaatttcccttgccatatcaattattccagagggattacctgcaacagctactattgtaatggctttaggcgtacagcgtatggctaaaagaaatgctttaattagaaaattacctgctgttgaaacattaggaggagctacagtaatatgttgtgataaaactggtacattaaccttaaataaaatgactgttacacatattgctgtcaatggagattttgaatctggaaaagtgacatcaatagatactgcatctgaaaaacatccattagtgtataaagagattgtttatgctggtgcactttgtaatgatgcatgtattaatccagataaaacagatgaaatattaggtgacccaacagagggcgcattaatttttatggccaaaaaatttggaatagatcaagaagctcttgaagaagaatatccacgtgtatttgaacagccttttgattcagatagaaaatgtatgacaactgttcataatatagatgaaaagattattgcttatactaaaggagcagtagacgaaattctcgacctatgtactaaaatattaacttcaaaaggtgaaagaaacattaccgaagtggataaaaagaatatacacgaattatgtcttaacatgtctaaagatgcattgcgtgtacttggttttgctaagcgtgagatttcatctataccaaaagaagatagtgaaaatatagaatatgatttgacatttataggtatggttggtatgattgacccaccaagaactgaggtaattgatgcagtaagtacttgtaaagaagcaggtataagaaccataatgataacaggtgaccataaagttactgccacaacaatcgctcatgagttaggaatatggagtgaagaaaatactgtgatatctggtgatgaacttgataattttagtgatgatgaactagatgaagctgttaaaaatactacagtatttgctcgtgtgtccccgtttgataaacttagaattatacaatctctaaaaagaattggagaagtaccagcaatgactggggatggtgtaaatgactctcctgccttaaagtctgctgatattggtatagccatgggtataagtggtacagatgttgcaaaagattcttctgacatgattttaatggacgatagttttacaacaattgcttatgcaataaaagaaggtagacgtgtatatagaaacatacaaaaagttatacaatttttgcttgttggtaatatagcagagatacttacgttgtttgtagcaatattattaaattgggatactccgcttcttgctgttcatattctatgggtaaaccttgcaactgctacgcttccagcccttgctcttggagttgacccaccaagcagaaatataatgaagcaccagccagtgaaatcaaccactttgtttgaaaaaaatcttatacaaagagttgttacccaaggtatatttgtggcaataatgactattttagcatataaaattggtcttaatatagaaaatcattctgtaggtcaaacaatggcattttgtgtattagcattttcacagatgttacgagcatttagtcagcgttcaaatacagattcaatgtttaatagaaataatggtaaaaatccatttcttttaatctcatttttaacttctgcatttttaatagcagtaatactgtttgtacctgtttttagaaatgcttttaacttaacagttttaaataacttagagtggcttataacgattgttttagccataatgtctgtaattcaagtagaggttgggaaaattattaaaagaaaaaaaagaaaaaaatagttgacaaaattaggaaaaatatataagatataaaacatagaaaaattaaataaatcttatccagagaggtggagggactggccctatgaaacccggcaaccagtatatttatatacattggtgctaaatcctgcggcgaaagctgagagatgagtataattaagcttatacagagcctgagttatatactcaggctttatttattttaactctcatctgataaatagtttaattttttttactaaaatctaagggggatacaagaatgtataataaagaaacaatatgtgtgcaaggaaattataaaccaggtaatggagaaccaagagtattacctttatatcaaagtacaacttttaaatatagcagtatagaccaacttgctgaattatttgatttaaaagttgatggacatatatattcaagaataagcaatcctactattcaagcttttgaagaaaaaataagtttactagagggtggagtatcttctgtagctgtatcatcagggcaatctgcaaatatgttggcagttttaaatatatgtaaatcaggagatagtatactttgttcttcaaaagtatatggaggaacattcaatttactaggacctagtcttaaaaaatttggtatagatttaatatcgtttgacttagattcaagtgaagatgagatagtagaacttgcaaaggaaaatactaaggttgtatttgcagaaacacttgcaaatccgactcttgaagtcatagattttgaaaaaatagcaaatgtagctaagagaattaatgttccatttattgttgataattcattagcatctccagtgctttgtaaccctttaaagtatggagcaaatatagttactcattctaccacaaaatatttagatgggcatgcttcaagtgttggaggaattatagtggatggtggaaactttaactgggataatggaaaatttccagaattagttgagccagacccaacatatcatggaataagctatactcaaaaatttggaaatgccgcatatgcaactaaagcaagagttcagttgcttagagactatggaaattgtttaagcccattcaatgcgtatcttactaatttaaatgttgaaacactacatcttagaatggagagacatagtgaaaatgcacttaaaatagctagatttttagaaaaacatgaaaatgtagattggattaattacccaggacttgaagataacaagtattatgagaatgccaaaaagtatttatcaagaggatgtagtggtgttttatcatttggagtaagaggtgggttagaaaatgccaaaaaatttgtggaaaaattacagatagcatctttggttacacatgtttcagatgtaagaacttgtgttatacatccagcttcaactactcatagacaattaacagaagaacaattaattgcatctggagtattgccttcactaataagattatctgttggaatagaaaatgtagaggatttaatagctgatttaaatcaagctttaaatttctaatattctaagagaaagagaagtgaaaagatatggctttaatactaccaaagggattacctgttattaataaattattagatgaaggaatagatgtaatttataaagaagattttaaaaaggaattaaagtatgaagaaaacatagacactaaaatagctatactaaatctaatgcctataaagatagatacagaattagatttactaagaaggatagataaaacaggattcaacgtgtctgttgaatttattaaaatttcaacaagagaaagtaaaagaagttgtaatgaatatgttaaagaattttataaaacatttgatgaagccaaaggagagtattttgatggctttataataacaggagctccagttgaacaaatggagtttgaagaagttgattattggaatgaactagaagaaattatggattattctaagagaaaaactaaatctacattatatatatgttgggcagctcaagcaagtctttacaaatactacaatgtaaaaaaacttccactaagtcaaaaatgttttggagtatttaagcataaggtagataaagatagtaaaatagtagatggatttgaaaatgaattttttgctccacattcaagacatactactgtaaatattgaagctttgaaagagaataaagagttgagcattgtgagtcattctaaagaagctggtccctatataattacaaattcaagagatgtgttcgtaatgggtcatagcgagtatgacaaatacactcttgataaagaatataagagggatataaataaaggagataaaatatctatacctcaaaattactatattaatgatgacccttcagaagagccaactgtaaaatggaaaaaacattcagaattgttgtttagaaattggataaaaaactatttgatacaataaattttaagagtatataaatgttaactaaaaaaatatagaaatttataggtataaagttaatcttaatgatactttataccttattttttttaaatttaaccttataatagtagttttatattttaagaaaatcactttaggtgtatgtagatagaggtggttttaattttatatatggtgcgataatgggagactaaacctttatagtatcaataaatttgtattttaacttttaaaagagattaaaaagggagaaatcagtgtaaaatatatatatcgattttttattaaattttattaaaaatatcctgtataaaattaaatatcaataagataacaaaattccaattgaagttacaatattgtaattgacaataaatacttaatactataatatttaatacattaaacattatagtattaagtatttatttacagtatgcacttcagcctaaatttgaaataaagtattttcgtagggagcgtttgtatggatgagatgagttttaagaaagagctactagagttgactagagatataaatatgaaatttacaactttattaagtgatttttatcagccacttggtattacagcagtgcaagctttgattttatctgagttatgtgaacatggagagaaaaaaataagcgatttagggaagaacttaaacatgacaaatagtaatgtatcagtaatctgtcaaaggcttgaaaaaaatggctttttaaatcgcataagagatatagaagaccaacgaattgtaaaagtaaaagttacaaataaatcattggatatacaagaacatatttcaagtagtatttttgatagttattttgaaaatatgaccagtgaaaaattgcaagatatggaagatataatagaaggtttagagaaattaaataaacttttaacttacattgattgcaaataacataaaaataatttaaaggagaataaaattatggatgaacataaaccccaaaaaaggtcagcactctattattatacagttataataatagtagtaatgtttttaaatgctttaatatttccaagtttaatggataaaaaaatggttgagattgactatggaaagtttctcacaatgttggatacaggaaaggttaaatctgttgagatagaaaataatagaatagcaataaatccatctagtagcaaggataagaatatatacataactggtagaatggatgacccagaattggtagatagactaaaaaatgcaaaagtagaatttactaaggttattcctaaggaaaattcacctcttttaagtattttacttacatggataatacctataggtattcttatgctatttggtaacttaatgatgaagtctatgcaaaagcgaatgggtggtaatgctatgcaatttggaaaaagcaacgccaaaatgtatgtatctgctcaaagtggaaaaagatttaatgatgtagctggtcaagatgaggcaaaagaagctttaactgaaatagtagatttcttacacaatccagaaaagtataaaaagataggagcacaaatgcctaaaggagcacttttagtaggacctccaggtacaggaaaaacactccttgcaaaagctgtagcaggtgaagcaaatgtaccatttttctcaatatctggttctgagtttgttgagatgtttgtaggaatgggagcttctaggattcgtgatttatttaaacaagcaaaagaaaaagctccatgtatagtgtttatagatgagattgatactattggtaaaaagcgtgataatggaagtggattaggtggaaatgatgaacgtgaacaaactttaaatcagttgttaagtgagatggatggttttgatggtggaattggagtagtaatacttgctgctacaaatagacctgacagtcttgacaaagcattacttcgtccaggaagatttgatagacgtataccagttgaacttccagaccttggaggacgtgaagctatattaaaggtacatgctcaaaatgtaaatgtaagctcagatatagattataatgcaattgcaaggtctacatcaggagcatcaggtgcagaacttgcaaatattgtaaacgaagcagcacttttagcagttaagtctggcagagatatagtagaacaacaggattttgatgaatctgttgaaactgtaattgctgggtatcaacgtaaaggagctgtaatttcagataaggaaaagaaaattatagcatatcatgaaataggtcatgcacttgttgctgctatgcaaaaacattctgcacctgtccataagattactataatacctagaacttcaggagcattgggatatactatgcaagttgctgaagatgagagtgtacttatgtctaaagaagaagcaattgataaaataactacttttacaggtggtcgtgctgctgaagaggttatctttaacacttgtacatcaggagcatcaaatgatatagaacaagctactaaaattgcaagagctatggttactcgccttggtatgagtgaagagtttgatatggtcgctcttgaaactgtaagcaatcaatatttaggaggagatacttctcttgcttgttcttccgacactgctgctaaaatagatgaagaggtatttaaaatagtaaaggcttgtcacaaaaatgcaattgaaatcttagaaaataatattgataaattgcatgaacttgctaattatttattagaaaaagaaactattacaggtgatgagtttatggaaatacttaacttaaactaaaatgattatacacaagataaaaatgcctattgttaggcatttttattttacaactaaattttttaaattcatatttaaatctttacataatcttaatcattaaaaatacatcttaactacaattttatatcggaattgatattataatagtaatgaatggtgtaaggaggttttttaatggatagacctaatcctgatattctattagaaaaaattaaaaatgaagaagaaaaactaagtagaggtcaattaaaaatattctttggttatgcagctggagtaggaaaaacctactctatgttggaatctgcacaaaatttaaaaaaagtgggtgtagatgtagtagttggatatattgaaccacacactagaccagaaacattggctctacttgatggcttggaaattcttcctgtaaaggagatagaatataaatctataaaactaaaagaatttgatttagatgctgctttagcaagaaaaccagaagttatattagtagatgaatttgcccattctaatgttgctgggttaaggcatacaaaaagatggcaagatatagaagaattgctgttagcaggcataaatgtctacactactgtaaatgtacaacatttagaaagtctaaatgacattgttgaggtaattacaaacgtatcagttaaagagactataccagataagtttttggatacaaatacacagttagaacttatagatgttgaacctgatgtacttcttgaaaggttcaatgaaggtaagatatataagaaagaacaagctactagagcaaaaaataatttttttataaaagataacctggttgcacttagagaaatcgcacttagaaaaacagcagagagagttaataaagaagttcaaatgaccagactatcaaagggtgatgtaactgtaatacctacatcagatacacttcttgcatgtataagtccatctccatcttcagcaaaagttattagaactgcatccagaatatcagacagtacatttgcaaaatggatagctttatatgttgaaactccaaacacagcaagacttccatttgatgaacaaaaacaactacaaaataacctaaaattagctaagaaattaggtggagaaataattgttttacatggtgaaaatataatagagcaaatacttagaattgcaaaactgagaaatgtaacaaaaattgtaataggtagaaatcattcaagtaataaaagatttagtaaaagatttaaaaaagatatagttgacaaattaattgatgaagttgattatatagatatacatataattccatataaatttgcctcagatgttaaatacaaacctaaaaaggataaatcatcaataaaatctaaatttaaaattagcaaagttgattttataaaacttatatttattactttgatgataagtattttagcatatgcagtacaaagcatgggatttataagagaaaatatattgttaatatatatgttgggtgtagttttagtttctatgtggactaaagggtatagtacaggtataataagttctgtatttaatatagttcttttaaattatttttttacagcaccattatatacattatctatagcagattcaaactatatagtaacactggttgtattctcaatagtaggtataataactagcactcttacgtctaagatacagcatgaagcagaaactgctgctaaaagagaagaaaatacaaaaatgatatatcaaataattaagggatttttaagattatcaagtaaagatgatatagtaaacaaaggtatagaacttttgtctcttagcttaagtagagatgtaatttgttatttaaatgtagataagcataataaatcaaaactttacaaaaaaaatactaataataaggataaaaatgatttggatagtgaagatgaaaaagctgttgcaagttgggttttatccaattcaacagtggcaggaaatgacacggatacacttcctggttcaaagggatactatataccaattgtaggaatgaatttaactttaggagtagtaggaatatcatgtattgattcaaaattggatacagaagatataagcttaattgaaacaataattgctcaaatggcaatagcgcttgatagagaaatcttgtcagaagctaaagaaaataccaatcttgagattgaaagggaaagattaagaagtaatcttttaagagcagtttcgcatgaccttagaactccactagcaggaatatctggtgcagtaagtacaattataaaaaacaagggtactataggtcaagatataatagatgaattacttagtggtgtatatgaagatactcagtggttaataagacttgttgaaaatttacttagtatgaccaagatagatgaagggaaattggaagttaaaaaacattctgaactggttgaggaaattatatcagaagcgttacaaaaaataaaaaaaagaattgaaaatgcacttatagatattaatataccagaacagatattatttgttcctatggatgcaaaattaatagaacaagttttaattaatttaatagataattctttgaaatattcaaaggaagattgtaagatagagataaatgtatacgagaaagatgattatgtttggtttgaagtatctgataatggtcctggtatatcaaaggaacttaaaaagcatatctttgacagattttttactggagaagaaggagctaaagattccagaaagggtgttggacttggattatcaatttgtaaatctataattcaagctcataaaggtgaaattatggtagaaaacaataaagataagggttcaacttttaagtttagtttgcctaaggaaaatgaatagttttaaattttaaaattagttttggaggaagaaatgagtaaaaaacttatattgttagtagaggatgataagacaataagaaaatttatatctactgcacttttaacacaggattatgatgtcaaggaggctataactggaaaagaaggtatatctattgctgtctcatattctccagatgttgttcttttagatttaggcttagaagatatggatggaatagaggtaataaaagctatcagacaattttcaaatataccaataattgtagtttcagctagagagcaagatagagataaggtagaagtatttgatgcaggggcagatgattacttaacaaaaccattctccatagtagagttattagcaagagtaagagtcgcatttagacattcacaagtagaagctcaacaaaaagatgatgttaaatctacgtttgaagtagataaattattgattgattttgataaaagaaaagttattgttgatgatgttgaagtccatttgacacctattgaatataatattctttcattacttgcaaagcatcatggaaaagtgcttactcataattttataataaaagaaatatggggtagtgttatagggaatgagactaagtctttaagggtctttatggcaacattaagacgaaaaatagaaaaacaacctgcaaacccaagatatataattacagaagttggtgtaggatacagattaaatgatgaatagttgtaatatattaattattagattatgtgcttattaatatatattaaaattatatagtttagttaaaataagaatgaagtgtatgtgcttgttgtcagtttagcacatgcattttattttttagctttttagtatcaataatatgaaatatgttttaaaataagtatatagtgtaatctgtaataaaaactttggttaaataataaatgtatttaacacttaccttataataaatttaatgtaaatattaaataataattgttaaaatagtgtaaaataattacagtaaggattataaaaaatttttagaatgtaaattgaaatttaggagtagatgtatgtatatactgaatttaaatacaagagagactattgaagattttagagataaattttatgtagcagaaaattcttatcttatattaagtgctccaaaaaatttaaaattgcttaaggaaactttggatatagatgaaataacttttaatgattgtcttaaatttgatgaaataaccaaacttgatttatttgataattacgattttttaagcctaaatacatttgaactaagagatggagaagctgttatagaagaagtaaatatgtatttatcagataattttatattggttgtagtgaatgaagaacactttttatttgaatttgtaaaaaatattattttgaagaactctcaacttgaaaaaaatccagttattaatctatttaagataaactacttgattcttagagaagttataaaaaatggttttgagtctttggaaaaagttgaagagttaattcttcaaatagaagatgaaatgatggacaacattaataagaatcatgtatctagaataagtgatgtaagaggattaacaagaattatagttaagaatactagacctcttttgtatattggggatagaatagttaaggaaaatataagatatttaaaatattcaaatgtaaaaaaatataatttagaaaattttcaaggtatagattttggaattgacaaattatacaatttcgcattgtcaacacgagagttagcagataaattattagatatttattcttccagagtaggtgagaaaacaaataacttaattacaaaattaaccttgttaacagccatatcagcaccacttacaattataactggtatatatggaatgaactttagatatatgccagaattaaactggatttatggatatccagcaactttattttttatgctatgtataatttttattggaattataatatttaaaataaaaaaattattgtaaattacagatgatgtttaattgattttataaaaatacatcaattgagaagctgatttaagtaaataaaaaaatattttaaattgaaaatatttatagaaaatattgacaattatattttctttgttataattattaaacaagaagaataataaattataaaaatggaggataatactatgaaaggaatattaaaagaactaacagcaaaactttatagctttttttactttatgttctggggcttttattttagcgctggctatttcttttacaaaaatatatgtacttcctttctggtgaggccttattttagtgattttgagcataagtaaattttataaaaatgattattttatatatttatataagatttagtgcttgatagattattttagagaactcattagtgagttctcttttttattttaaatataaaattataatattgggaggtagtaaaaatgatagtagtattaaaaatgggagcagataaaaatgaagttaaaaaattaattgaggctattgggagagaaggagtagaagttaatcccatagatggaacagaattaactgttttaggtttagttggagatactagtaaaatagatgccaaaagaatagaagcaaataagatagttgaaaaagttatgcatgtagtagagccttttaaaaaggccaatagaaaatttcatccagaaccttcaatcataaatgttaatggaatggaaattggttcaaagaaaattgctatgatagctgggccttgttctgttgaaacagaagaccaaatagtatctatagctaaagatgtgaaaaaatcaggtgcaggatttttgagaggtggagcattcaaaccaagaacatcaccatacgctttccaaggattgaaatatgatggattggatttattaaaaaaagcaaaagaaaaaacagggcttcctatagttacagaaataatgtcaacacaagatatagatatatttgaagaaaatgtagatgtaattcaagttggagctagaaacatgcagaactttgatttattaaaagaattaggtaaaacaaataaaacaatacttttaaaaagaggattatctgctacaattgaagagtggctaatgtcagcagagtatataatggctggaggaaatgaaaatgtagttctttgtgaaagaggtataagaacttttgaaacatatactagaaatactttggatttaagtgcaattttagctgtgaagaaacttagtcatttaccagttatagttgacccaagtcatgcagcaggtaaatcatggatggttgactctttatctaaggcagcaattgcagttggagcagatggtctaataatagaagttcataatgacccagcacatgcactttgtgatggaaaacaatcgattaagccaaatgaatatgatgaattgataagtgaattaaagactatcgcatcagcagttggtagagaaatataatctataaaaggatggttaaacgtggaagaaaaactattagtaaatttaaaagaaaatagctacaatatatttattaaaaaaaatatactaaagaatataggagaagaaataaaaaaaatatattttggaaataagatttttattgtaactgatgaaaatatagcaaaattatacttggataaagtaaaaaataatttaagtgaatctggatttgaaattaaatctttaatattaaaatctggtgaagaaacaaaatcatttaatactcttcctaaaatatacgatagtttacttgactttaagttaactagaaaagatttgattattactttaggaggaggggtaataggtgatttaggtggatttgcagcagcaacttttttaagaggtataagttttattcaaattccaacatctttattagcacaagttgatagttctgtaggtggaaaagttggagttgaccttgagagaggcaaaaatttagtgggaagcttttaccaaccaaaagctgtgtttatcgacccaaatgtattattatcacttccagaaaaattctatagagatggaatggcagaagttataaaatatggatgtataaaagacaaaacttttttcaataaacttttaagtttaaaaaatagagaagaagtaatgcaacatatagaatacattatacataaatgttgctttattaaaaaaactgtagttgaagctgatgaaaaagactttggagatagaatgcttctaaactttggccatacattaggtcatgctattgagaaatactacaattttacgggttatacccatggagaagctgttgccataggaatgtataagataactttagaaagtgaaaagataggaattacaaaaaaaggtacatcagaacttataaaatcaattttaatgaattataatttgccttatgagattgaattaagagataataaatctatagtagatgctatatctcttgataaaaaaaatctaggtgatacattaaaaataatacttttaaaagatattggagagagtattatatataatactacttctaaattttttcaggaggtaagataatgggaagtctaaaaatatatccaagtaaattatctggagatgtaaaaataccaccatcaaaaagtatggcacatagggcagttatttgttcatctctaagcaatggaaaaagtagaatttctaatatagatttttctgatgatataatagctactataagagcaatgacatcattaggagctattatagaaaagaaagaagatattttagaaatttcgggaattttttctaaagaaggtattttaaatagagagaatcagttgaatcaacctaaattgacaatagattgtaatgaatcaggctctacattaagatttttagtacctatatctttagcatttgatggtgtaaaaaggtttataggtagaggtaatcttggaaaaagaccacttgatacttattatgagatatttgacagacagaatataaaatatagttacaaagaaaatcagttagatttgattatatcaggtaagcttaaaccagatgaatttagagtaaaaggaaatataagttctcagtttatcacaggtctattgtttatattgcctacactagagagtgattcaaagataataattactactgagctagaatctaaaggatatttagatttaactctttcaacgataaaagattttggggtagaaattataaacaataactataaagaatttattataaaaggaaatcaaacgtataaagcgagagattataaagtagaaggagattattctcaaggagcattttatttatcagcagatgctataggagaagatattagcatattagaccttaaagaagattctcttcaaggggatagtgaagtagttgaaattttatctaggatgggaatggaaatattaagagaaggcaacaaaataaaaggaataacaaatggtttaaatagtactttgatagatgcatctcaatgcccagatataatacctgtattatctgtagtagcatccttaagtatagggaggactacaataattaatgctggtaggcttagaattaaagaatgtgatagacttcatgcaataaatgttgagttaagtaaacttggagcaaatatagaggagaaagaggatagtttgataatcgaaggagtaagcaagttaaatggtggagtagaggtgtggagtcacaaagaccatagaattgctatgacacttgcaattgcttcttgtagatgtgataaaccaataatattaaaagattttgagtgtgtatcaaaatcttatccacatttttttaaagattttaagatgttaggaggtcgaattgatgagtggaatatggggaaataatttaaaagtatcaatttttggagaatctcatggaaatgctataggtataaatatagatggtcttccttcggggattgaacttgaccttgataagattgataaagaaatgaagagaagagcacctggaaaaaattctatatctacttcaagaaatgaaagtgatataccagaaattctaagtggatattttaatggaagaactacaggaacgccattatgtgcaatcataagaaatagtgatactcgttcaaaagattatggagagcttaaaaatttaatgagaccaggacatgcagatttcacaggtaatgtgagatattctggatttaatgactatagagggggaggtcatttttcaggtaggataacagctccattagtattttgtggggctatatgtaaacaaattttatcacaaaaaggaatagagataggagcacacataaaaaaaattaaaaatatagaagatatgagttttgattatgtaaatatttcaaaacaacagttatcaaatttgcaaactttggaactacctttacttgatttatcaaaggaagaagccatgaaaaatacgattatagatgcaaaaaatcaaagagattcagttggtggtataattgagtgtgcagtagtaggtattaatgtagggcttggaaatccattttttgactctgttgaatctactttatcacatttattgttttctgttcctgccgtaaaaggtgtagagtttggtttaggttttgaacttgcagatatgtatggctctcaaagtaatgatgaaatgtattatgaaggaaatcaagttaagagcaaaacaaataacaatggagggattataggagggattactactggaatgccaataattttcaaagtggcaattaagccaactccttcaattagcagacaacaaaacacagttaatataaaagataaaaaggacgatattttatatattaaaggcagacatgacccttgtatagttcaaagggctatacctgtaatagaagcagtaacagccattggaatttttgatttgatgaaaggacgataataatggaggatttaacgagatatagaaatgagattgacaatatagataaagagattattcaattatttgaaaagagaatgaatacagttcttgaaattgccagacataaaatgaaaaataacactactatacttcaaaaagatagagaagaaaaagtactaagtagagccatagataatttagataataaagcatactcacaagaaacggtacagttttttaattctataatggaaattagtagaggattacaaaaaagattgatagataatgatggtgagcagaaaatcgagtttagtttagattcatcaaataagaaatttgatttgtcaaatgtaaataaatataagtctttaaaagatgaattaaataaaaaaaatatcctagtaggatttccaggaaaatcaggttcatttacagaagaagcactaaataaattcttcaacaaaacaatatcaaaaaaacaatttaaagaatttgaagatgttttcatagcacttaaaaataaagaaataaactatggaataatccccatagaaaattcatctacaggagctatctctgaaacttatgaccttttgagaaagtacggtttttatatagttggagaagaatgtataaaaatagaccaaaatttaatagggataaaagacacaaaacttgaagatataaaagaaatatattctcatccacaaggtataggacaatgtagtgaatttttaaaacaaaatagtacatggaaattgataccatttaataacacagcaacaagtgcagaacttgtaagaaaacttcaagataaaacaaaagcagcaattgcaagcaaaaaagctgcaagtatttatgaattagaaataataagtccttgtataaatgatattgcaaacaactatacaagatttgtagtaatcagtaatcaaatacacattgaagaagaatcaaacaaaatgagtgtagtattttctgttgaacatgaagcaggaaaactttataaagtacttggatactttgctgaaaataatataaatatgacaaaaatagagtcaagacctatgaaaaatgcctcatggagatatttcttttatatagattttgagtgttctatatacaattctaaagtgtacgacttattagaattgatagaacataatacagcatattttaaatttatgggagtatataaaaataaaactgaatagataatataaatttttatttaatttataattattaggaggtgtaagtatgaattttttcggtctagtaggtgaaaaactctctcacagtgtttcacctcaaatccacaagagaatattcgagatattgaatattgaaagtgcttataaaaactttgaaattccaaaagaagatatatctaagctagacggtgctataaaattattaggaatacaaggagtaaatgttactgtaccatataaggagcgtattatgaaatatcttgattttatatcaccagaggcaaaacgtataggagcagttaatacaattttactcagagaaaatatgttatatggttacaatacagattactttggtcttgatagtatgtttaaaatggctaatattgatgttcaaggaaaagtagcagttatattaggaactggaggtgcttctaaagctgctcttacatattttattgattctggtatagaaaagctttatgtttcaactagaaaaaaggatgataaaaaattattaaatagtaaagctatattaatagattatgaagaacttaaacatataaaaggagatataatattaaatgctacaccagtaggtatgtaccctaatgtaggaatttcaccagtgtcaaaatctattatacaaaattttgatatattaatagatttaatttacaatcctggagaaacagagtttttaagaattggtaatagtatgggtaaaaaaacttgtgatggattatatatgctggtagggcaagcaataaaatctcaggaaatttggcaagatactaaaatagataatagtattttagatgttatatataatgaactaaaattagaatttttgtaagggagattgtcatgataaataaaacaaaagaaaaattgatattaataggtatgccaggtagtggaaaaactacaattggtaaacttttggccaaagaatataattgtagtttctgtgatatggatgattatataattcaaatatctcaaaaaagtatagcagagttgttttcagaaggagaagatatctttaggaactatgagactcaagcatgtagagaactttctataagtgataaaacagtgatatctacaggtggaggtgtaataaaaaaggatgttaatatggaaatactaaaagaaacaggtataataatttttattgatagacctatacaaaagattttggaagatataaatattaattcaagaccattattaaaaaacggaaaagatagattgtataatctttataatgagagaataaatctttataaaaaattttcagatatagagattttaaatgataaatcattaaataatgctgtatataatattacaaatgcagtcagtgaaaattttaaatttgactttaaagaaaaataatctagggggaaataaaaataatgaatattgttattgtaggactaggagttataggaggctcttttgctaaagcattaaaaaaagctggatatgaaaatgtatttggagtagatgtagatttagaaactttaaaaaaagcagaaaaagcaaaaatcataaaaaaaggatgtactacaggtaaagagttatttaaaaaagctgatttaattatactatctatatatcctagattagttgtagattttctaaataataataaaaacttttttaaaaaagggactataattactgatactacaggaataaaagaaacacttatcaatgatgtgttgcaaattattccagatgatatagattttatatttggacatccaatggcaggtagggaaaaaaagggtattgattttgcaagtgaacaagtttttaatggcgcaaattatataattactccaactggcagaaacaacataaaaaatttagagttagttgaaaatttaattttagagattggatttaaaagagtaaaaaagttaacttcacaaaaacatgatgagattatagcttttacttctcagttacctcatgttatggcagttgctcttataaatagtgatgaagaaggtagagatacaggtaaatttattggagatagttatagagatttaactagaattgcaaatatgaatgaagacttatggagtgaactttttttaggaaatagagataatttactaaaagttatagaaaactttgaatcagaagtaaatttagtaaaagaagctatatttaacaatgataaaaataaattgatagagtattttaaaaaatcatcaataagaagagaagctttagaaaaataaatattaatatttaagctatatatagatgggtataaatgtaagcgatagtgtatttaattgtattaataaatatggattcaatataattaaatatgctattgatatatttgtacccttaactattgttatcttttaaatgataatgatatttatttaaatgctctttattaacaatttataaaacttaattgtaaaaaatacttattaatagtaaaataaagtgaatcaattatattataattgctaaagagagtgaggtgtagctatttgaaaaaaaatagattaataataaagaatatatcaatagcatttatagtactattcttttttagtgtatttacattcttttatataggtaatattagtagagtattagaatatgaaacaaatgacataatgacagttacaattactggatggattatactttcatttttatttttatgtattataatttacatattatattcaaaagcaaagagtcaaaaaactatagaaaaagtagcatatacggattttgtaacaggttattccaactggagaaagtttgaattagatgttacaaatttattaaagaaaacatcacaaaataataaatatgcaatggtcatattcgatattgataaatttaaagcaattaatgatatatatggacataaaaagggcaatttaatattaaaagatattgcagatactttaaatgaattgactaatatcaatgaaacttttgctcgtgtaagtgctgataattttaatatattattaacatataacaaaaaagaggatataataaatattattaaaaaaattatagcaaataatgaacttgtaaacttatcttttggaatttatgaaatcaaagataaggatttatctgtaagtgtatatagtgatagagcttcacttgcaaaatcatcaataaaaaataatagtgatgtaaattttgcattttttaatgataaattaagagagaaattattacttgaagataagatagaaaaagaaatggaatatgctcttgaaagtgggcaattcgtaatgtatttacaaccaaaatataatattaaattagataaattttgtggaagtgaagccctagtcagatggcaatatacagaaaaagaagtcatatatccaggtgattttattcctatatttgaaaaaaatggatttattagaaaaattgatatgtacatattagaacaagcttgtaaagaaatccggtctttatttgataaaggaatttcacctttacctatatctgtaaacttctcaagagttgattttttaaaaaaagattttattgaaaacatagtaaatatatgtgatagatataaaataccatatagtttaatagaaattgaaattactgaatctagtatgtttggagatactgatactctatttaatgttagtagaaacctacaggatattggttttatagttgcaatggatgattttggctcgggatattcttctgtaaatatgcttaaaaatataccattaaatgtaataaaattagatagaggattttttgttgatgataaagatgttgataagagtcaaattgttataaaaagcatagtttctctcattaagcaattaggaataagggttgttgctgaaggaattgaaacaagaagtcaaatagaaatgttaaaaaaagcaaattgtgatattgttcaaggatattatttttcaaaaccattaccaattaaagaatttgaaaaattagtctataaaatatagtcagcgagtcttaaatgggaggtggtgattaagtgataagagcaaaatcgttaaaaaatgtactgagtattgttttaatatttttatttacaataatttctttttctgattttgcatttaaaactaatgtccaggaagaagaaaatagtaaaattaatttaagggaaatatccctacaaagttccaatgctataaaaataaaattagatagttctctatcctttattaaaagtgtggcaaatatggtttcttattttaatactatagataactcaaaaatagttccattattagctaacatatcaaaagaatctgactttcaaagaatctctattgtatctcctgatggaataagtcataccagcgatggcaaaattatcaatgtgtcaaaatatcagtattttaagaaagctattaaaggagaaagcaatatatctgaagttgtgaaatctccaattgatggaaaagatacttttgttatagctactcctatatttaataagaataacaaaataattggtgttttatacggttcttactacaatgataaattagctgaatttatagatataacaagttttaatagtgaagggtacatagatatatttgaatctagtggtcaatttgttttaaaatcttcacatacaaacaaactgattaagtcaagtagtaacatatatgatatatttaaaaaagcttcttttgatgatggttatagctataaaaaaatatatgaagatacaaaaaataacaagagtggctttacctcatatgaatacaaaggagaaaatcgttatgctacttatacacccattggtgtaaatgactggtatgtaatttctgtgataccacaatatactgtaagaagaaacattgataaaataaatcaattagcattttctcttattttcaaagtattcttattgtttattatgcttataatatatattatttataaaaacaataaatctcagaaagatatactaaaagctaacaaagaaatctcatctattacaaatagcattcctggaggagtacaaaagtgtaccctgggtgaaacatgcaatattaattttttaagtgatggatttatagagttgtttggttatacaagagaagaaataaaaacattgtttaataatgatttttatagtttaatacataaagatgatgttgaaagaataaaaaaagaaatttctaaacaactttacaaaaataaaactattgaattagaatataggattataacaaaaaatggtaatacagtatgggttttagataaaggagaacttataacagaacctgatggaaaagaatatttttgttgtgtaactgtagatattactagaacaaaacaattagaacaagagatggaacaaaaaaatctagaacttgaaatgatatcagaaaatattttaggtggtataattataacagaatttaatgatgattttactataaaatacactaactctggttatctttcaatgattggatatacacgtgaacaattagaaaatgaacttaaatacaaagcttgtaatcttgttttttatgaagatagaaagaaggctcttgaaagtatacaacatcaattaaacacaaaaggaatagctgtatatcaacatagaataagaagaagagatggtaatattatctgggtttctataaaaggaaggcttattattgatgatgatggtattgaaaaaggtatttggattctaaatgacataacagatttaaaaaatgcagaacaaaaacttaaaataaatgaagaaagatttagaattgcattaaagcaaacatcaaatactatatttgagtatgatataaaaacaaagtcacttttaaatactagtaaagagcttgataaatataatatttataaaattactaaaaacgttccatattctctagtagaatcaggagttattcataaagattttagtgatgattttataaacatgtatgaaaatgtaataaatggagcaaaaaaagcaagttgtgtagttaagatgaaacttccagatgaaaattatatatggaataaagttaccttgactactatttttgatgaagatggtaatcctgtaagagcaattggtatacaggaagatataagcaaacaaaaggaagcagagataagatataatcaagaaggtaagtatcattcagctatattgtcggaagcaatgataacctatgaaataaatgtatcaaaagatacttttatcaaaggaaatgaaagttggcaaaaaccatttggaattaagcctgacaataattattctgaaatggtaaaaactatatcaaacagtattattcacaaagacaataaagaggtgtttttaaatacatttttgtgtaaaaatttattatctgcatataacaaaaatataactgaaataaaattagaatatcgaagaatgaatcaagaaaataaaatgatttgggtcatttgcacaatgcacttaataaaagattctattacgaatgatataaaagcacttgcttatgttaaagatattgacaagcaaaaaaatgaagaaattaaattaaaattaaaagctgaaagagatactcttacaggattatataataaaggtactacagaaaatttgattaatgatttcttgaactctgacgaagcaagcttaggaatgcatgcatttttaattgttgatatagataattttaaatctgtaaatgataatttaggacatgtatttggagataaagtattatttgaagtttctaaacacctaaaacctatatttagaaaagatgatatagtaggtcgaattggtggagatgaatttatagtattcttaaaaaatattcagtcttttgagaataccaaaaagaaagcagaaaaaatatgcgatatatttagaaattcttatacggaaaataaaaagacatataaaatatctggaacagttggaatttcatttgtaccagaacatggaactgtatttgaagaactttataaaaaagcagacatagcactttattatgcaaagagcaaaggaaaagataagtatgcactttataataattgtatctaccaaaatgaacttgaaaataatataagtgataataatataaaattagcaaataaatgtgagaaatccaaaccagtacttaaagaaattcttgattctattgataattatatttatatagtgaatccaaatacttatgaacttctttttgtcaataataaggtgtctcgtttggatttagagataaaattaggagaaacctgttataaatcactattaaaatctgagagaccatgtaataattgccctcttaacggattagaagaaaataagcattcaaaattcaaaatagagacaaatacatttggtaaaaatatcagtatagcaagttggattaattgcatagatggagaatacaactgtcttatagagtgtatagattcttctttatacaaaaataaataaaaaaggactatgaagatatgttaaatagtataactttgatacttggtataatatttacaatttactatttttatctcaaaatagtttttggaggaatttcatttagtgagattttcttagttgtaggaattgtactaattatctatcaaatatttaagaaaaaaattaaagaaaagaaggttttttatagggtgttaaaaataataatcagcatttttttaatagtatttgtagttactgagagtttaattattttttatcctaaaaatagtttagaatcaaaaagtgattatctcttaattttaggagcttctgtaaaaaagactacaccaagtacaaccctgaagggtaggttagacactgcattgaaatacctaaaaattaatgataattgttatgtggtagtatctggtggtaaaggaagtggagaaaaaataactgaggcaaaagctatgaaagattatcttataaaaaatagtatagataaaaataggataatagaagaggataaatccacgaatacttatgagaattttaaatattcaaaattgaagatagaagaacatagtcaaagaaaactaagtgatttaaaagtaaaaatagtaacaacagattttcatgttctcagaagtaaaatattagcatatagaaatggatataaaaatacgtctttttatgctagtaaatcaaaactttcatttgtaccaacttactatacaagagaattttttgcattatggaaaacaatcatttttgatagataataaataaaaagactagatataaactcatatctagtcttttctattcccttaattctaatccattttccaactttacttgttgtagaaatttcaacattgggatttacaagtaattgcttataagaagttttatattttacgattccaaaatataattttccttcataatccattataaatccgaatgatcttactcttggtttattatcttcaactgtagcaaaatagaatgttgagttttcttttaaaaaattcattattttttccatgattaaatcctctttgtatcttatactaatataatgaatataaataaaatatttataatactaatataaattgatataaaaacaattacaatattatattgattattcaaaattatatataaaattcagaaaaacatttcagtttacataataaaaataaagtaaactaaaattattgattttagattaaagtgccagattaagtatttaagtagattttaagcttgatttgattagaaaggtacaaactatcaccgaaaaaaattaaacccatttaaaaagcaatataaaagcttgttattttcgagaaaaatagaccctctaaactcaattagataaaaataaaatacaaaaaattatatctctgaatatctcaagtaattaagtttaaattttacgatattttgtttgatgatttataatataaaagcatattcttaatcttctcaaattaaaaagagtaaaaaataacaaaaaaatcactgacatttcactgacaaattgtaattttgttattataaatacattgaaaatacttgattattgaaaaatggcataaaataataccttttatgccatttactattgtttgatagtttttaacttatgacataagatattttttaacatatacaataaaatataaaaaaattgatattgcaaataaaaaaaatacatattagatgttatagaaaaaaagcgcacttataggcttaaaatgtcacataaaagagtttcaaagaataatatattatgaacacaaattttgtaatcacaaaggagtgataatatggcaacagtatcaggacaaatagtttttgatagaaatagaagtgctaccattgattctggggactcaggaatagccaatataccagttgtattacaagatatagcaactggagttagacttgtggttctcacagatgcatcaggaaattatgtttttactaatgttccaaatggtaactatagaattgtagaagcttttggaactacaggaggagtaccaacaccagggaattttgcaacagcgatagtaggtccagttccaattgcagaaatgccacctattagttctgtgacaaatcctcctattggttcaacaaacttagatggtacaacacctaacacactattaataacagtagcaggttcagatataataaatcaaaatatattaaatgggcctgtgatttatacacctatagagaatatattggattcttgcgtgtctgtatctaatataaaccttattacagatgcagataacggaacattcggtttttttccaccaggtacaccaagtaatacaggacctgaaatagaaccttacccaaatgtgacgccagattttacgtatgttgtaccagacccaactaagtttacacctttagatggagaatatacagtacaaaatattatgacaaatgcaatgagtaatgttataggagcttggtggcgtattgctgaccatactacaggaaatgaaacaggaagaatgatggtggtaaatggttttaatcctggagctgtattttttaaatcaacagtacaagttacacctaacactaattatttatttagcacttggattttaaacctttttaaggtaacaggatatccaccaccacagctaggtgtaagaatatttgaccaaaataataatatactatatcaagcaacattaggagctcaaattccagttaatacaaacgcaccagaatggaaagaagtaggtactgtgattaattctcaaaataataatcaacttacagtagaattttttagtgaaggagaaagcgccattggaaatgactatgctatagatgatgtttctttaagagaaatagctgttccaacctttactccaataaaaacaagtaacacagaaactgctaatgtaggtgatataatcacatatacagttacattagataatacttgtgatagccctttaactaatgtattttttagggatttaattccaaatggtttagagtttatacctggaactgtaacggttgatggagtatctgtaccaggagtagaccctaatacaggttttccacttccagatattggaggaggaataggggttgaagtaacttttgatgttgtggttgaaagtattcctaacccaaatcctactaataatatagctactatagattactcctatacacctgtagaaggcggtataccaaatgatttttcagtagattctaatccagttcctgttgaagtaatctcagcagatgttgaagttacaaaattatctgaacctactatagtgaatccaggagaggaattaatatacactataaaagtagtaaataatggaccattcccatctgagaatgtggttttaacagatgatgtaccagcttctattataaatccagagtattcattagatggaggagtaacttttcaaccatggactggaagtttaaatatagggacattagaagtaggagagacaagagttattataattaggggtattgtaaatccatcaacagtaggaattataacaaatacagctgtagtatcttcaactacagcagacccaaaccttaataataatacatctacaatagagacagaagtgaatttattagcagatattttagtaatgaaaacagcagaacctaattcagctgttccaggtactttattgagatatactattcaagtagaaaacttaggaccagcaaatgctgaaaatgtaatattaaatgatgatattccagcctctattataaatccagaatattcattggatggaggagcaagttttcaaccatggaatggaagtcttaatataggaactttaaactctggaatttcattaacagttttaattcaaggaacagttagtttaaattcttcagaatatatagtaaatacagcaacagtttcttcaactacacctgacccagatttaagcaacaatatatctaccattattacaccagttaacccacaagcaggtatttctattataaaagtagctgacgaggatgtagctgttccaggagaagaatttgtatatacaattgaaatttttaatgaaggaccatctaatgctacgaatgtagttttaacagatgatataccagatgttattttaaatccagaatattcattggatggaggagcaactttccaaccatggaatggaagtcttaatataggtacagttgcaccagggcaattaataagaattatcataaagggattagtaagttcaactgctacaggagatattactaatacagcagaagtaagtgcagatgtaccagaaccagttacggattcatcaacagtgacaactcctatagttccatcagcagatatagaagtaataaaaactagcaatatggatacagcagttccaggagaaacttttagttatactataacagttataaatttaggaccatctgctgcacaaagtatcgttttgacagatgatataccagatgttattttaaatccagagtattcattggatggaggagtaactttccaaccatggaatggaaatcttagtataggcactttggatgctggagaaataagaagtattataataagaggaacagtgagccagacagcagtaggtacaattataaatacagcaacaataagttcacctacacctgacccaaatccagataataatacttcaacagatgaaacagatataagtccattagcagatatttctgtgataaaaggcaacgaaccagttgctataccagggggaagatttatttatggaattgaaattgcaaatgcaggaccatcttttgcagagaacgtaactttaacagataatataccagcttctattttaaatccagagtactcaatagataatggagtgactttccaaccatggaatggaagccttaatataggtactttagatgctggagagataagaaatatcataataaggggaacagtaagtcaaacagcaataggtacaattataaatacagcaacagtaagttcaactacacctgacccaaatctaaataacaatacttcaacatcagaagcagaggtaagttcatcagcagatatttctgtagtaaaacgaagcaatcagactgttgttgtaccaggagatgtactagactatacaattgaggtgagaaatgcaggaccgtctactgctcagaacgtaactttaacagataatataccagcttctattttaagtccagaatattcaatagataatggagtgacttttcaaccatggaatggaagtcttagtataggcactttagatgctggagagataagaaatattataataaggggaatagtaagtcaaacagcaataggtacaattataaatacagcaacagtaagttcaactacacctgacccaaatctaaataacaatacttcaacatcagaagcagaggtaagttcatcagcagatatttctgtagtaaaacgaagcaatcagactgttgtcgtaccaggcgatgtactagactatacaattgaggtgataaatgcaggaccgtctactgctcagaacgtaactttaacagataatataccagcttctattttaagtccagaatattcaatagataatggagtgacttttcaaccatggaatggaagtcttagtataggcactttaggtgctggagagataagaaatatcataataaggggaatagtaagtcaaacagcaataggtacaattataaatacagcaacagtaagttcaactacacctgacccaaatctaaataacaatacttcaacatcagaaatagatataagttcatcagcagatatttctgtaataaaattagcaaataaaacagaagcatgtgtagaagagcaaatagattttgtaatagtagtatcaaatgcaggaccagaaaatgctcaaaatgttactttaatagacaatgtttcagataagcttaagaaagcagtattttcacttgatagaggtgtaagtttccaaccatggactggaagtcttaatataggtacactaccagctggaactttaagagttattctattaagaggaattataaaatcaacatgtcttgatagattaacaaatattgcagaagttacttcaacaacaccagattcaaaccttaacaataatatatcaagagtgcaagtagaaataaaacaatgttgttgtaatgattgctgttgtaacaactgtagtaattgttgttgcaatgattgtggttgtaaagattgttgctgtaattgttgtaaaaatgacttttggtgttgattttataaaataattttgtataccttaaattaaactgaaataaaaaataaattcacatatgagtaaaatattttataaatattaataaattttctatctttgatatggaccacattcgtaatactagttattaaatgaagtggtcctttttaattcattaaaattatttattctaattaaattttaaatgtattaaataattttaattttttataaaaaatattcatatattctttatattaaagtttagatatctaaaaatacttttagaatttattatattatgttaatttttttatatcttataatgattatatttttctaactataaaaatagtatttacttatatttaaaaataaaagaattttattcctattgtgtaaagtgagaatactattttcttatattggtataataatagtaaatctataatatagaaaagaggtatttctagtatgcatgaaaataaaaagaatctattagacggaagcttagctcaatataatgatacagcagttccaaaaataccagtatttgctggtaacgatataacttcagaagtttattattttaaacctaatcaagttcttaatgctcatagacaccctaatggtgaacaaatatttgtgttcctaaaaggagaaggtaaaatgaaacttggtgagcatgaatgtgatgtaaaaaacggcgatactgtatttgtaccaacaggagagtggcatgaaattactaatggaagcaatgaagaaatggtagccgttcaaattacaaaaattaatgctggagcagaatacagaggatagatatataagtacagttagtactttaatatctattttattatataaactttaatctcaaatataaaaagagtcttttaaaaggctctttttatatttttgttaattttcattataaaaacaagaaaatatctagctaaaactaatatattttatttaatattttttatagcattgtttgcaaactcagtatttacgatatctttataaggtgcttccttatctagttctttagcttctttcataacagtcatcaatttcttcaaaccttcctcctttaatacaggattttgagaccatgcatctattgatttatatctatctacaactgttgttaaatcttctaaagatatatcttcaaagaaaggttgcatagccttagctacttctttgctagatgcttgttgaacccataattgacctttataaacagcatttgtaaatctttgaattaaatctttattgtttttcatgtatgatctcgtagtagagtatgctgtaaaaggtatttctccagaatcttttcctatagatgtaactatatatccactaccttctttttccattgctgttgctgtaggttcaaatgctgttgtaaagtcaccctctccacctgcaaaagctccagccattacaccaaattgtacatcagttcttacattaacattgcctgcttttagattttctccaatagtaagacctttttcttttagaacatattcaaaagtcattagtggaactccaccttttctaccacctaatatttctgttccttttaaatcattgtaagagaaattaggcatttttttcctagcaactagaaaactaccatctctttttgtcaattgagcaaagttcactgcataatcgtttttgttttgattatatacatatatagatgcttcaggacccattaaacctacgtttgcttcacctgaaatcaaagctgccatagttttatctgcaccttgggtatttataaggtcaatctttataccttcatcttcaaagaatcctttcgtaatagcagcatactgtggagcataaaaaacagagtgagtaacttctgctatagttactttatccagatttttagacgaagaagattcatcttttttgtcattagagttaaaatcacatccagttagacatattgtacttacaatgatagagcttgctattgcgactatttttttaaacataataaatacctcccataagacatacgaatagtatatagtattaaaaatttattgtagttgttacaaaaatgtatctatgcttataatatttctacaaaaacttaataataattttcagttttatgtttagtttttttagtaatatgtaatattggataaattatattgattatttataaactaagtaataaaattaaaataatatcacttttttgtctattatatataaggaaaaattttttaataatataaatcatattcatttatattattaaaaaatttgtttatagaaacttttattattttatataaaaatgataaaaacttatattttgtatttaatagagtgttgctaagtgaatatatttaaaatggaggaaactttatgaaacaaaataaatatgatgatgatagattttttaataaatacagtaaaatggaacgttctacaaatggattagcaggtgctggagaatggcatgttttaaaaaaaatgttacctgatttcaaaggaaaaagagttttagatttaggatgtggatttggatggcattgtcaatatgcagttgagaatggagcaatttctgctgttggagttgatatttcagaaaaaatgttaaaagaagctagaaacaaaacgcaacttgataatataaattacatatgtatgcctattgaagatattaattttccaaaagatagttttgatgtagttattagttccttggcatttcattatattcaatcatttgaagatatatgtaagaatataagtaattgtctttcaaataaaggtaattttgtattttctgttgaacatcctatatttactgcatatggaagtcaagagtggtactgtgataaagatggcaataatctacactggccagtagatagatattttgaagaaggagtacgtaagtcaaattttctaggagaagaggttataaaatatcataaaacattaacaacttatttaaatacgttaatgaaaacaggatttgaaatattagaaattattgaacctcaaccagaagaaaaactgttagatacaattcctgatatgaaagatgagctacgtagacctatgatgttacttgtatctgcaaaaaaaagataagtaaatataaataatcattattgtagaaaaaaattgtagaaaataattacactaatggagatgattataccagtggtattaattacaccagtagtaaggaggcaaaagcattcgttgcttttgccattttttaagttgcaattatacttctacgtagtatatttcgtttccattttcttctataagctttttcatatcttcaaattttaaaaatacagtagcagtattatcatttggatgtatacctattttatccatttttaataaatccttatcaaatacaacttttacaacagcctctttatcatttaatataccaaaaggagtcacagctcctttagtaagtttcaagtatttttgaagtctttcttctgatgcaaaactaagaggtttactatcaatttgttgacgaatatcttttaaatctgcttttttgtctttacctaatacaactaaaaaatgttcttttcctttagcatcacgaagaaataggttttttacaacaaattccatatgtaatgtttttaattcttccatttcttcaattgtataaactggtggatgatttacagcctcataaggtatgcttaactcatctaattttttatatacttcctgttgttgattgttcatgatttcctcccattagaaatttattttatatataaataatattatcacagaaaactttaaaagaaaacgttttatataatatagacaatagattatatttttataaagaagcaagaatactcaataaaacttaaagaaattaaacaatttctaaaaataccttgaaaatagaaccttatttgccatttataaattatataaaaagggattatataaagtcatatatgaaaaaactatattatactatcttttctttttggaataaactatactttaaatatagatatttaatttaaataaattttacagtattaatagtaaattatcttagaaaggaatgtgctttatatgtctacagacaaagttgttggaatcatagatgaagaaacggcagaacttgcaggaattgaatatactggtaaaatttatgcttcttctggtgttataaaacatataaagaaaaaacatagatgtcaactgagtaaggatatttttaatgatataatagacactataaaagtggtattaaagtcacctgaatatataggaagtcatcctaaaaaacctggaaaaagtgtggagtttataaaaaaaattgataattatattttagtagctacagaattagatacaaaaaaaggatatttatatgtatcttcaatgtatgctataaaagaagcaaaattagaaagtagagtaaacaatggaagagtaaaacaatatgatggttaacataatattattaattttccccaaaatattgaaaaatattattatataagttataatattaatatacacgtagatatttattagttagatttgaggttggaaaaggcacccaatacgctactatagagtagttaatagagatgcaggatacgccgccctgccaaatctaattaaattaaaaagagaggattaattcctctctttttgtttttttgagatactaatttaatctatatagaaagattgaaggtcatttatactaaaagttttcagttatatacattaaactaattaaataagatatttataatctatatatgatacatattatatattaataaaagaaaaatatatagaaaatccttataaaaatttaaattgtaatgaatagtaagtaattaaaaagaatttttattgatttttaaaaatttagttagaaactatatcattatggtaaagaatgtattataatgtttagaaatattataataaggagcgattaaacatgaatctatcgaagaaaatagaagataaaagaaaagctaaacagagagctgaaaaagttaagaaagctaaaattgctacagctggtgtggtattaggagctgttactggtgcagtgagtggagtacttttggctcctaaatctggaaaagaaacaagagaggatataaaagatgcttcacaacaaattgctgaaaagataaatatgaaaactgtagatgtaaaaggcaaagtatctgagaagctagaggataaaaaaggaaactttatagaatcaaagaaaaaaataaaaaaatatatagataacaaaaagagtgttgaaaattctagtgaggaagataaaataatagatatagttgaaccagttagtgttactgaggaataatatggacaatacaataacgattaacataagtataatatatgtattattagctatacttgcttgtattgctttagtttatttaattattgtacttgttaaactacataagattttaaataatgttggaactatgttaaatgaaaatactcaaaatataaatacaactttaaataatcttcctaatgttgtagaaacttttggagaagtaggagaaaatatgaaagatgtaacagaagtagttactgaagttacagcagattttcttgttactaaagacagtgtcaaatcaaatatggatgttatagtcgatatattgactataattaaaaatatttttctagataaaaagtaataaatttaatataaaataagatataatttaaacgaccttaaaataacatttataaggtcgttttttattagcttgatttgacactatgtgtttttaataattggtaatattcctctttatcatttgaacatatatatctatgcttgttgtttcaattacatccataagaacatctttacattcaagctcaaaatcttccattccttctaaatattcatcatcttcatcaaaaaagatataagaattatatagccattcttcaaatttttcttcaagtatatcccaatacgaactccaaaataatccacaacctgatatataagatgctctactttgatttatataaacctcatttagaagcttttgtaatctactgctataaagaaaatctgctcttccactgcttgatattaattcatttaaatcttctattgacattaattcaactttaccacttttatcataaggagtataattttcatcaacccatttatgtggtttgttttctctgcatactgttgctatcaactctacaacttttgttcttatcatttttttatcctaacttatttattttttataaaataatcatgattttataatttatctatttcttgtaatgctaatttaacagtttcatatctatcagcaccatttattactacatcaccttttacaagtttattagcttctccacctacaacataaacctttttacctaaaccttgcttataactagacgcctcaattattaaagaatctttcaattgccaatgtaaaatctgagcagccactttatcagcatcacctgtataaacgattacattttcatacactttattttcccctcccccttgagaatttgatatagatttgtttagtataccttctgctatcaatttagcaactttatctttattattaacataataatctgtatctgctttactatctacaaaacatacttctattaatattgctggtgcaatagtatgattaagccaataaagacctctaacatcagactttgcacccctatctttgaatactgtagctaacctagtattcactctttctgcataggttttgccattattagtcttatatattgtttctgtccctactggagttgaagttgtagcatttgaattaaaatgaatctgaacagccaaatcagtttcctgtttatttgctatagcacattggtctgctaaatgattacttgattcatcaactcttcctgtataaacagtagctccacctattttaagccatttaacaattaagtcattcagtattcttgtttctttgctttcgtttatatacccaacagctcctgtaccttttccaattaaagtgtgccctggtattattactactttcaaactaacatctcctttacaattaaatttaacttctatttaatatatgcataacctagaattttgtttctttttatatcttatacttttattataacccattttgtaaaaatatagaatattaagtaaataatgttaaaattataattttgtatataagacattacttgattgcaataattttatagcatattcatctattctatatccagttctataatatatatgtttaattccagcttgaattatagccttagtacaatttaagcaaggaaagtgagttacataaatagagcaatctttaactgaaataccttcttttgcacaataataaagggcattttgttcagcgtgaatggttctaatacaatgtccatctctcatttcatgaccaacttcactacaatgcttatctccagaaatactaccattatatccagtagacactattctgttttctgaattgacaattatagctcctacataagctctatcacaagttcctctttcagctactgtttcgcacagtctcataaaatattcttgccatgagcatctattttcaagttttttattcaaatcatatacctccaaaatttatatctaatatataagatttataccttaaaaataatattaaaaacaaatttatacgataaataaaatttattaatactgtttttagtctaaattatttcattttaaattaaagttacaaggaatctaaaattatatatatctttcttcgtaatatgaatgttacaatataaaaaactgtctcaataaaatagagacagttttacagtcaaagtttataatacaagttcatatttttctttaaattcttttacagcttcgggccatgccttttgttctgtaatacctttttctttagctattttaattgcaatctctcttatcattgcagcgccttctaatattcccatttttaatctcccttcaaatatctttttgtatagaatataaatagtgctaagatttattacatgctgcatatacaatatctatacaacacataacttgtaaattccttttattttcatacgtctttaaccgacatataattatattcaataagttttaaaattatgaactcaattataattatttttatttttttagaatctaaacactaaaaattgtaggtaaatttgtcttatgcctttataaatatttctacagttttaattactggacatatctatttttattataaaaagcgcttaaaaatcgagaatatccgcgtaaaagctgtatataagcaaaacgattaaaggaaaaagaagaaatttacttgaatgttaaaatgcgttgcttgaagcaacgggcagttttgcctataatatcggtaacaactgaaagaaaggtggttagccctaatgttaagcgaaaacattaaaacaatcaggaagtcaaaaggactttcacaacaagaacttgctatcaaactgaatgtagtgcgacaaacaatatctaaatgggaacaaggactgtcggttcccgattctgatatgttgatttccatatcagaggtgcttgaaacgcctgtaagcactttacttggagaaactattgttgagtcggaagttgatagcttaaaagtgatttctgaaaaattagagattataaacttgcaacttgcacaaagaaaaaacatgagaagaaaaatgtttcattggttatttattttattatgtgcagtcatagtaatagtttttgtggtcttagggggactaaatagtccttacttggatt
